(19) United States
(12) Patent Application Publication
(10) Pub. No.: US 2025/0011372 A1
(43) Pub. Date: Jan. 9, 2025

(54) AAV CAPSID VARIANTS AND USES THEREOF

(71) Applicant: VOYAGER THRAPEUTICS, INC., Lexington, MA (US)

(72) Inventors: Mathieu Emmanuel Nonnenmacher, Boston, MA (US); Matthew Alan Child, Ashland, MA (US); Jinzhao Hou, Lexington, MA (US); Jiangyu Li, Watertown, MA (US); Shaoyong Li, Hopkinton, MA (US); Tyler Christopher Moyer, Boston, MA (US); Wei Wang, Arlington, MA (US); Matteo Placido Placidi, Arlington, MA (US); Robert H. Vass, Gardner, MA (US); Brett Hoffman, Braintree, MA (US); Elisabeth Knoll, Melrose, MA (US); Yanqun Shu, Winchester, MA (US); Nilesh Navalkishor Pande, North Grafton, MA (US); Jeffrey Scott Thompson, Stoneham, MA (US)

(21) Appl. No.: 18/710,005

(22) PCT Filed: Nov. 16, 2022
(86) PCT No.: PCT/US2022/079963

§ 371 Date: May 14, 2024

Related U.S. Application Data
(60) Provisional application No. 63/414,377, filed on Oct. 7, 2022.
(60) Provisional application No. 63/286,545, filed on Dec. 6, 2021.
(60) Provisional application No. 63/280,417, filed on Nov. 17, 2021.

(51) Int. Cl. C07K 14/005; C12N 15/86

(52) U.S. Cl. CPC C07K 14/005; C12N 15/86; C12N 2750/14122; C12N 2750/14143; C12N 2750/14145

(57) ABSTRACT

The disclosure relates to compositions, formulations, and methods for the preparation, use, and/or formulation of adeno-associated virus capsid protein variants.

### RELATED APPLICATIONS

[0001] This application claims priority to U.S. Provisional Application No. 63/280,417 filed on Nov. 17, 2021, U.S. Provisional Application No. 63/286,545 filed on Dec. 6, 2021, and U.S. Provisional Application No. 63/414,377 filed on Oct. 7, 2022; the entire contents of each of which are hereby incorporated by reference in their entirety.

### SEQUENCE LISTING

[0002] The instant application contains a Sequence Listing which has been submitted electronically in XML format and is hereby incorporated by reference in its entirety. Said XML copy, created on Nov. 10, 2022, is named V2071-1132PCT_SL.xml and is 3,391,526 bytes in size.

### FIELD OF THE DISCLOSURE

[0003] The disclosure relates to compositions, formulations, and methods for the preparation, use, and/or formulation of adeno-associated virus capsid proteins and variants thereof.

### BACKGROUND

[0004] Gene delivery to the adult central nervous system (CNS) remains a significant challenge in gene therapy. Engineered adeno-associated virus (AAV) capsids with improved brain tropism represent an attractive solution to the limitations of CNS delivery.

[0005] AAV-derived vectors are promising tools for clinical gene transfer because of their non-pathogenic nature, their low immunogenic profile, low rate of integration into the host genome and long-term transgene expression in non-dividing cells. However, the transduction efficiency of AAV natural variants in certain organs is too low for clinical applications, and capsid neutralization by pre-existing neutralizing antibodies may prevent treatment of a large proportion of patients. For these reasons, considerable efforts have been devoted to obtaining capsid variants with enhanced properties. Of many approaches tested so far, significant advances have resulted from directed evolution of AAV capsids using in vitro or in vivo selection of capsid variants created by capsid sequence randomization using either error-prone PCR, shuffling of various parent serotypes, or insertion of fully randomized short peptides at defined positions.

[0006] Attempts at providing AAV capsids with improved properties, e.g., improved tropism to a target cell or tissue upon systemic administration, have met with limited success. As such, there is a need for improved methods of producing AAV capsids and resulting AAV capsids for delivery of a payload of interest to a target cell or tissue, e.g., a CNS cell or tissue, or a muscle cell or tissue.

### SUMMARY OF THE DISCLOSURE

[0007] The present disclosure pertains at least in part, to compositions, formulations, and methods for the production and use of an AAV particle comprising an AAV capsid polypeptide, e.g., an AAV capsid variant. In some embodiments, the AAV capsid variant has an enhanced tropism for a tissue or a cell, e.g., a CNS tissue, a CNS cell, a muscle tissue, or a muscle cell. Said tropism can be useful for delivery of a payload, e.g., a payload described herein to a cell or tissue, for the treatment of a disorder, e.g., a neurological or a neurodegenerative disorder, a muscular or a neuromuscular disorder, or a neuro-oncological disorder.

[0008] Accordingly, in one aspect, the present disclosure provides an AAV capsid variant, comprising an amino sequence comprising the following formula: [N1]-[N2], wherein: (i) [N1] comprises X1, X2, X3, X4, and X5, wherein: (a) position X1 is: P, Q, A, H, K, L, R, S, or T; (b) position X2 is: L, I, V, H, or R; (c) position X3 is: N, D, I, K, or Y; (d) position X4 is: G, A, C, R, or S; and (e) position X5 is: A, S, T, G, C, D, N, Q, V, or Y; and (ii) [N2] comprises the amino acid sequence of VHLY (SEQ ID NO: 4680), VHIY (SEQ ID NO: 4681), VHVY (SEQ ID NO: 4682), or VHHY (SEQ ID NO: 4683); and/or an amino acid modification, e.g., a conservative substitution, of any of the aforesaid amino acids in (i) and/or (ii). In some embodiments, (a) position X1 is P; (b) position X2 is L; (c) position X3 is N, D, I, K, or Y; (d) position X4 is G; and (e) position X5 is A. In some embodiments, [N2] is or comprises VHLY (SEQ ID NO: 4680). In some embodiments, the AAV capsid variant further comprises one, two, or all of an amino acid other than T at position 593 (e.g., V, L, R, S, A, C, I, K, M, N, P, or Q), an amino acid other than G at position 594 (e.g., S, A, T, M, V, Q, L, H, I, K, N, P, R, or Y), and/or an amino acid other than W at position 595 (e.g., S, P, G, A, Q, L, M, K, C, E, F, H, R, T, V, or Y), relative to a reference sequence numbered according to the amino acid sequence of SEQ ID NO: 138. In some embodiments, the AAV capsid variant further comprises one, two, or all of an amino acid other than V at position 596 (e.g., D, F, G, L, A, E, or I), an amino acid other than Q at position 597 (e.g., P, K, R, H, E, or L), and/or an amino acid other than N at position 598 (e.g., T, K, H, D, Y, S, I, or P), relative to a reference sequence numbered according to the amino acid sequence of SEQ ID NO: 138.

[0009] In another aspect, the present disclosure provides an AAV capsid variant comprising one, two, three, four, or all of: (i) an [N1], wherein [N1] is or comprises: PLNGA (SEQ ID NO: 3679), SLNGA (SEQ ID NO: 4684), QLNGA (SEQ ID NO: 4685), ALNGA (SEQ ID NO: 4686), PLNGS (SEQ ID NO: 4687), PVNGA (SEQ ID NO: 4688), PLNGG (SEQ ID NO: 4689), PLNGT (SEQ ID NO: 4690), PLDGA (SEQ ID NO: 4691), QLNGS (SEQ ID NO: 4692), PLNGN (SEQ ID NO: 4693), SLDGA (SEQ ID NO: 4694), HLNGA (SEQ ID NO: 4695), ALNGT (SEQ ID NO: 4696), PINGA (SEQ ID NO: 4697), ALDGA (SEQ ID NO: 4698), PLNCA (SEQ ID NO: 4699), PLNGQ (SEQ ID NO: 4700), PLDSA (SEQ ID NO: 4701), RLDGA (SEQ ID NO: 4702), QLNGN (SEQ ID NO: 4703), PLNGY (SEQ ID NO: 4704), PLDSS (SEQ ID NO: 4705), PLNGC (SEQ ID NO: 4706), PLYGA (SEQ ID NO: 4707), TLNGA (SEQ ID NO: 4708), PVDGA (SEQ ID NO: 4709), PLKGA (SEQ ID NO: 4710), PLNGD (SEQ ID NO: 4711), KLDGA (SEQ ID NO: 4712), PHNGA (SEQ ID NO: 4713), PLNGV (SEQ ID NO: 4714), PLNAA (SEQ ID NO: 4715), QLNGY (SEQ ID NO: 4716), PLDGS (SEQ ID NO: 4717), LLNGA (SEQ ID NO: 4718), PLNRA (SEQ ID NO: 4719), PLIGA (SEQ ID NO: 4720), PRNGA (SEQ ID NO: 4721), or ALNGS (SEQ ID NO: 4722); (ii) an [N2] wherein [N2] is or comprises: VHLY (SEQ ID NO: 4680), VHVY (SEQ ID NO: 4682), VPLY (SEQ ID NO: 4723), VNLY (SEQ ID NO: 4724), VHRY (SEQ ID NO: 4725), VHIY (SEQ ID NO: 4681), VHHY (SEQ ID NO: 4683), FHLY (SEQ ID NO: 4726), LHLY (SEQ ID NO: 4727), DHLY (SEQ ID NO: 4728), VQLY (SEQ ID NO: 4729), IHLY (SEQ ID NO: 4730), VDLY (SEQ ID NO: 4731), AHLY (SEQ ID NO: 4732), VLLY (SEQ ID NO: 4733), GHLY (SEQ ID NO: 4734), VRLY (SEQ ID NO: 4735), or VYLY (SEQ ID NO: 4736); (iii) an [N3] wherein [N3] is or comprises: AQAQ (SEQ ID NO: 4737), SQAQ (SEQ ID NO: 4738), AQPQ (SEQ ID NO: 4739), AQSQ (SEQ ID NO: 4740), AKAQ (SEQ ID NO: 4741), AHAQ (SEQ ID NO: 4742), AQAP (SEQ ID NO: 4743), DQAQ (SEQ ID NO: 4744), APAQ (SEQ ID NO: 4745), AQAK (SEQ ID NO: 4746), AQAH (SEQ ID NO: 4747), AQEQ (SEQ ID NO: 4748), ALAQ (SEQ ID NO: 4749), ARAQ (SEQ ID NO: 4750), or TQAQ (SEQ ID NO: 4751); (iv) an [N4] wherein [N4] is or comprises: TGW, TGL, TGS, TGG, TAW, TGR, TAS, LSS, TSS, SSL, SSS, TLS, TVS, VSS, TSP, VSP, TMS, LSP, VAS, TAL, TTS, TLP, VLP, RGW, LSG, LAS, SSP, LLP, STS, TSA, TTP, SAL, LGS, VTP, VSA, IGW, TGF, LTP, TLA, LSA, TVG, TAP, TMP, TSL, VQS, SSM, SLP, VSQ, RSS, TST, VMS, TTA, TQP, LST, LAP, TVA, RLS, TGY, TSG, TAG, VMP, TSQ, TMA, VGS, TSW, TGV, TGT, TLG, LMP, VQP, TGM, SMS, SQL, IGS, RSV, TAA, STP, LSQ, TAQ, TGP, ASP, VSG, SAP, TLQ, LQP, TAT, TGQ, ATS, IGG, VAA, TSM, TVW, TAM, TGA, VAT, QSP, TQA, VQA, RSP, LAT, VAQ, LAA, RST, RTL, LGT, LMS, LGP, RTS, SQP, VLG, SVS, TMQ, SAV, LAG, SGP, TNS, RLT, TTQ, SAA, TSV, RLG, RAS, STQ, CSP, SAG, ALP, VTS, ISP, SVG, LTS, TTT, RSG, TQL, LNP, TVQ, IAS, LAQ, LSR, LSN, TTG, TSN, SMA, TKS, SVA, TQQ, VQQ, RLP, SAM, TAV, TQW, SSR, TQT, VNS, RSA, LMG, RQS, LVG, VTA, RTT, SMG, VMA, TKP, SAQ, NSP, ATP, VAG, RGS, VKP, RMS, NLP, NAL, RTP, RQL, VQG, VTG, VST, NAS, RVE, ATG, AMS, RNS, VMQ, SMQ, LQQ, TMG, LGQ, TSH, AAP, RSQ, TYS, ITP, VAK, TQM, TKA, SQQ, ISG, VSR, RTA, RML, SQM, VAN, CTP, ISS, AGP, TAK, RTG, LHP, TMT, AQP, QAP, RQP, LKS, NTT, TSK, RYS, KSS, NTP, VGG, IAA, LMA, MAP, VHP, VLS, LAN, ATQ, TNA, TAN, VSN, AAA, AVG, LTA, SAN, RAG, RQG, TLR, LSH, SAF, RAA, IQP, ILG, VNG, SVQ, LSK, TNG, RTQ, TMN, RGG, TTR, VRP, VKA, LAR, NQP, TMK, TYA, TQK, TTK, IAG, TQN, LAH, NTQ, RQQ, RAQ, TKQ, TQH, TNQ, LMQ, VNA, VQT, TQR, VGK, VKQ, IQS, LQR, TMM, VGN, RIG, SAK, RIA, VQN, NVQ, RIP, NAQ, NMQ, TPS, LTN, VTK, PGW, LPP, SPP, TPA, TGC, VPP, TPT, TPW, TPP, RPP, TPQ, TPR, TPG, VPA, VPQ, RPG, KGW, TRW, TAR, IPP, RSL, LVP, KGS, VAP, KGG, KAW, PGS, TRL, or AGW; and/or (v) an [N5] wherein [N5] is or comprises: VQN, VKN, VQT, VQK, DQN, VQH, GQN, VQI, VHN, FQN, LQN, VLN, VRN, VQS, VQY, AQN, VEN, VQD, VPN, IQN, VKK, DKN, VKT, VQP, EQN, GQT, FQK, GHN, or VPH; and/or wherein the AAV capsid variant comprises an amino acid modification, e.g., a conservative substitution, of any of the aforesaid amino acids in (i)-(v).

[0010] In yet another aspect, the present disclosure provides an AAV capsid variant comprising one, two, three, four, or all of: (i) an [N1], wherein [N1] is or comprises: PLNGA (SEQ ID NO: 3679), SLNGA (SEQ ID NO: 4684), QLNGA (SEQ ID NO: 4685), ALNGA (SEQ ID NO: 4686), PLNGS (SEQ ID NO: 4687), PVNGA (SEQ ID NO: 4688), PLNGG (SEQ ID NO: 4689), PLNGT (SEQ ID NO: 4690), PLDGA (SEQ ID NO: 4691), QLNGS (SEQ ID NO: 4692), PLNGN (SEQ ID NO: 4693), SLDGA (SEQ ID NO: 4694), HLNGA (SEQ ID NO: 4695), ALNGT (SEQ ID NO: 4696), PINGA (SEQ ID NO: 4697), ALDGA (SEQ ID NO: 4698), PLNCA (SEQ ID NO: 4699), PLNGQ (SEQ ID NO: 4700), PLDSA (SEQ ID NO: 4701), RLDGA (SEQ ID NO: 4702), QLNGN (SEQ ID NO: 4703), PLNGY (SEQ ID NO: 4704), or PLDSS (SEQ ID NO: 4705); (ii) an [N2] wherein [N2] is or comprises: VHLY (SEQ ID NO: 4680) or VHVY (SEQ ID NO: 4682); (iii) an [N3] wherein [N3] is or comprises: AQAQ (SEQ ID NO: 4737), SQAQ (SEQ ID NO: 4738), AQPQ (SEQ ID NO: 4739), or AQSQ (SEQ ID NO: 4740); (iv) an [N4] wherein [N4] is or comprises: TGW, TGL, TGS, TGG, TAW, TGR, TAS, LSS, TSS, SSL, SSS, TLS, TVS, VSS, TSP, VSP, TMS, LSP, VAS, TAL, TTS, TLP, VLP, RGW, LSG, LAS, SSP, LLP, STS, TSA, TTP, SAL, LGS, VTP, VSA, IGW, TGF, LTP, TLA, LSA, TVG, TAP, TMP, TSL, VQS, SSM, SLP, VSQ, RSS, TST, VMS, TTA, TQP, LST, LAP, TVA, RLS, TGY, TSG, TAG, VMP, TSQ, TMA, VGS, TSW, TGV, TGT, TLG, LMP, VQP, TGM, SMS, SQL, IGS, RSV, TAA, STP, LSQ, TAQ, TGP, ASP, VSG, SAP, TLQ, LQP, TAT, TGQ, ATS, IGG, VAA, TSM, TVW, TAM, TGA, VAT, QSP, TQA, VQA, RSP, LAT, VAQ, LAA, RST, RTL, LGT, LMS, LGP, RTS, SQP, VLG, SVS, TMQ, SAV, LAG, SGP, TNS, RLT, TTQ, SAA, TSV, RLG, RAS, STQ, CSP, SAG, ALP, VTS, ISP, SVG, LTS, TTT, RSG, TQL, LNP, TVQ, IAS, LAQ, LSR, LSN, TTG, TSN, SMA, TKS, SVA, TQQ, VQQ, RLP, SAM, TAV, TQW, SSR, TQT, VNS, RSA, LMG, RQS, LVG, VTA, RTT, SMG, VMA, TKP, SAQ, NSP, ATP, VAG, RGS, VKP, RMS, NLP, NAL, RTP, RQL, VQG, VTG, VST, NAS, RVE, ATG, AMS, RNS, VMQ, SMQ, LQQ, TMG, LGQ, TSH, AAP, RSQ, TYS, ITP, VAK, TQM, TKA, SQQ, ISG, VSR, RTA, RML, SQM, VAN, CTP, ISS, AGP, TAK, RTG, LHP, TMT, AQP, QAP, RQP, LKS, NTT, TSK, RYS, KSS, NTP, VGG, IAA, LMA, MAP, VHP, VLS, LAN, ATQ, TNA, TAN, VSN, AAA, AVG, LTA, SAN, RAG, RQG, TLR, LSH, SAF, RAA, IQP, ILG, VNG, SVQ, LSK, TNG, RTQ, TMN, RGG, TTR, VRP, VKA, LAR, NQP, TMK, TYA, TQK, TTK, IAG, TQN, LAH, NTQ, RQQ, RAQ, TKQ, TQH, TNQ, LMQ, VNA, VQT, TQR, VGK, VKQ, IQS, LQR, TMM, VGN, RIG, SAK, RIA, VQN, NVQ, RIP, NAQ, NMQ, TPS, LTN, VTK, PGW, LPP, SPP, TPA, or TGC; and/or (v) an [N5] wherein [N5] is or comprises: VQN, VKN, VQT, VQK, DQN, VQH, GQN, VQI, VHN, FQN, LQN, VLN, VRN, VQS, VQY, AQN, VEN, VQD; and/or wherein the AAV capsid variant comprises an amino acid modification, e.g., a conservative substitution, of any of the aforesaid amino acids in (i)-(v).

[0011] In another aspect, the present disclosure provides an AAV capsid variant comprising [A][B], wherein [A] comprises the amino acid sequence of PLNGA (SEQ ID NO: 3679), and [B] comprises X1, X2, X3, X4, wherein: (i) X1 is: V, I, L, A, F, D, or G; (ii) X2 is: H, N, Q, P, D, L, R, or Y; (iii) X3 is: L, H, I, R, or V; and (iv) X4 is Y; and/or wherein the AAV capsid variant comprises an amino acid modification, e.g., a conservative substitution, of any of the aforesaid amino acids in (i)-(iv). In some embodiments, the AAV capsid variant further comprises one, two, or all of an amino acid other than T at position 593 (e.g., a V, S, L, R, I, A, N, C, Q, M, P, or K), an amino acid other than G at position 594 (e.g., T, M, A, K, S, Q, V, I, R, N, P, L, H, or Y), and/or an amino acid other than W at position 595 (e.g., K, Q, S, P, C, A, G, N, T, R, V, M, H, L, E, F, or Y), relative to a reference sequence numbered according to the amino acid sequence of SEQ ID NO: 138.

[0012] In yet another aspect, the present disclosure provides an AAV capsid variant, comprising PLNGAVHLY (SEQ ID NO: 3648) and optionally wherein the AAV capsid variant further comprises one, two, or all of an amino acid other than T at position 593 (e.g., A, L, R, V, C, I, K, M, N, P, Q, S), an amino acid other than G at position 594 (e.g., M, S, A, Q, V, T, L, P, H, K, N, I, Y, or R), and/or an amino acid other than W at position 595 (e.g., S, P, T, A, G, L, Q, H, N, R, K, V, E, F, M, C, or Y), relative to a reference sequence numbered according to the amino acid sequence of SEQ ID NO: 138.

[0013] In another aspect, the present disclosure provides an AAV capsid variant comprising an amino sequence comprising the amino acid sequence of PLNGAVHLY (SEQ ID NO: 3648); and which further comprises one, two, three, or all of: (i) the amino acid at position 593, relative to a reference sequence numbered according to the amino acid sequence of SEQ ID NO: 138, is: T, A, L, R, V, C, I, K, M, N, P, Q, or S; (ii) the amino acid at position 594, relative to a reference sequence numbered according to the amino acid sequence of SEQ ID NO: 138, is: G, M, S, A, Q, V, T, L, P, H, K, N, I, Y, or R; and/or (iii) the amino acid at position 595, relative to a reference sequence numbered according to the amino acid sequence of SEQ ID NO: 138: W, S, P, T, A, G, L, Q, H, N, R, K, V, E, F, M, C, or Y; optionally, provided that the amino acids at positions 593-595, relative to a reference sequence numbered according to the amino acid sequence of SEQ ID NO: 138, does not comprise the amino acid sequence of TGW.

[0014] In yet another aspect, the present disclosure provides an AAV capsid variant comprising X1-X2-X3-X4-X5-X6-X7-X8-X9-X10-X11-X12-X13-X14-X15-X16-X17-X18-X19, wherein (i) X1 is: P, A, D, E, F, G, H, K, L, N, Q, R, S, T, or V; (ii) X2 is: L, D, E, F, H, I, M, N, P, Q, R, S, or V; (iii) X3 is: N, A, D, E, G, H, I, K, Q, S, T, V, or Y; (iv) X4 is: G, A, C, D, E, P, Q, R, S, T, V, or W; (v) X5 is: A, C, D, E, F, G, H, I, K, N, P, Q, R, S, T, V, W, or Y; (vi) X6 is: V, A, C, D, E, F, G, H, I, K, L, M, N, Q, R, S, T, or Y; (vii) X7 is: H, A, D, E, G, I, K, L, M, N, P, Q, R, S, T, V, or Y; (viii) X8 is: L, A, D, E, F, G, H, I, K, M, N, P, Q, R, S, T, V, or Y; (ix) X9 is: Y, A, C, D, E, F, G, H, I, K, L, M, N, Q, R, S, T, V, or W; (x) X10 is: A, C, D, E, F, G, H, I, K, L, N, P, Q, R, S, T, V, or; Y; (xi) X11 is: Q, A, D, E, H, K, L, P, R, or T; (xii) X12 is: A, D, E, G, H, L, N, P, Q, R, S, T, or V; (xiii) X13 is: Q, E, H, K, L, P, R, or T; (xiv) X14 is: T, A, C, D, E, F, G, H, I, K, L, M, N, P, Q, R, S, V, W, or Y; (xv) X15 is: G, A, C, D, E, F, H, I, K, L, M, N, P, Q, R, S, T, V, W, or Y; (xvi) X16 is: W, A, C, D, E, F, G, H, I, K, L, M, N, P, Q, R, S, T, V, or Y; (xvii) X17 is: V, A, D, E, F, G, H, I, or L; (xviii) X18 is: Q, E, H, K, L, P, or R; and/or (xix) X19 is: N, D, H, I, K, P, S, T, or Y.

[0015] In yet another aspect, the present disclosure provides an AAV capsid variant comprising an amino sequence comprising the following formula: [N1]-[N2], wherein: (i) [N1] comprises the amino acid sequence of PLNG (SEQ ID NO: 3678); and (ii) [N2] comprises X1, X2, and X3, wherein: (a) position X1 is: A, V, T, or G; (b) position X2 is: R, K, Q, G, or V; and (c) position X3 is: H, A, M, S, T, Q, or Y, or; and/or an amino acid modification, e.g., a conservative substitution, of any of the aforesaid amino acids in (i) and/or (ii).

[0016] In yet another aspect, the present disclosure provides AAV capsid variant comprising one, two, or all of: (i) an [N1], wherein [N1] is or comprises: PLNN (SEQ ID NO: 4752), PLNG (SEQ ID NO: 3678), PSAR (SEQ ID NO: 4753), TLNG (SEQ ID NO: 4754), PLNM (SEQ ID NO: 4755), SLNG (SEQ ID NO: 4756), SING (SEQ ID NO: 4757), ALNG (SEQ ID NO: 4758), PLNL (SEQ ID NO: 4759), PGRQ (SEQ ID NO: 4760), or LVNS (SEQ ID NO: 4761); (ii) an [N2] wherein [N2] is or comprises: PGH, VKA, ARM, VKM, VRA, VRS, TRM, VRT, VRM, AKM, VKS, VQM, AVH, TRS, VRQ, AQM, VKY, ART, AGA, VQA, VKT, PVH, GVH, AGH, VGH, TGH, or TVR; and/or (iii) an [N3] wherein [N3] is or comprises: LY, IY, LN, DY, LS, or VS; and/or wherein the AAV capsid variant comprises an amino acid modification, e.g., a conservative substitution, of any of the aforesaid amino acids in (i)-(v).

[0017] In yet another aspect, the present disclosure provides AAV capsid variant, comprising an amino sequence comprising the following formula: [B]-[C], wherein: (i) [B] comprises X1, X2, and X3, wherein: (a) position X1 is: P, Q, A, H, K, L, R, S, or T; (b) position X2 is: L, I, V, H, or R; and (c) position X3 is: N, D, I, K, or Y; and (ii) [C] comprises the amino acid sequence of LY.

[0018] In another aspect, the present disclosure provides an AAV capsid variant comprising one, two, or all of: (i) an [A], wherein [A] is or comprises PLNN (SEQ ID NO: 4752), PLNG (SEQ ID NO: 3678), PSAR (SEQ ID NO: 4753), PLNM (SEQ ID NO: 4755), SLNG (SEQ ID NO: 4756), SING (SEQ ID NO: 4757), PLNL (SEQ ID NO: 4759), or PGRQ (SEQ ID NO: 4760); (ii) a [B], wherein [B] is or comprises PGH, VKA, VKM, VRA, VRS, TRM, VRT, VRM, ARM, AKM, VKS, VQM, AVH, TRS, VRQ, AQM, VKY, VQA, VKT, PVH, VGH, or TGH; and/or (iii) a [C] wherein [C] is or comprises LY.

[0019] In yet another aspect, the present disclosure provides an AAV capsid variant comprising X1-X2-X3-X4-X5-X6-X7-X8-X9, wherein: (i) X1 is: P, T, S, A, or L; (ii) X2 is: L, S, I, G, or V; (iii) X3 is: N, A, or R; (iv) X4 is: N, G, R, M, L, Q, or S; (v) X5 is: P, V, A, T, or G; (vi) X6 is: G, K, R, Q, or V; (vii) X7 is: H, A, M, S, T, Q, Y, or R; (viii) X8 is: L, I, D, or V; and (ix) X9 is: Y, N, or S.

[0020] In yet another aspect, the present disclosure provides an AAV capsid variant comprising (a) the amino acid sequence of any one of the sequences provided in Tables 1A, 1B, 10, or 20; (b) an amino acid sequence comprising at least 3, 4, 5, 6, 7, 8, 9, 10, 11, 12, 13, 14, 15, 16, 17, or 18 consecutive amino acids from any one of the sequences provided in Tables 1A, 1B, 10, or 20; or (c) an amino acid sequence comprising at least one, two, or three but no more than four different amino acids, relative to any one of the amino acid sequences provided in Tables 1A, 1B, 10, or 20; or (d) an amino acid sequence comprising at least one, two, or three but no more than four modifications, e.g., substitutions (e.g., conservative substitutions), insertions, or deletions, relative to the amino acid sequence of any one of the sequences provided in Tables 1A, 1B, 10, 20. In some embodiments, the AAV capsid variant does not comprise the amino acid sequence of TGW at positions 593-595, relative to a reference sequence numbered according to the amino acid sequence of SEQ ID NO: 138.

[0021] In yet another aspect, the present disclosure provides an AAV capsid variant comprising (a) the amino acid sequence of any one of SEQ ID NOs: 139-1138; (b) an amino acid sequence comprising at least 3, 4, 5, 6, 7, 8, 9, 10, 11, 12, 13, 14, 15, 16, 17, or 18 consecutive amino acids from any one of SEQ ID NOs: 139-1138; or (c) an amino acid sequence comprising at least one, two, or three but no more than four different amino acids, relative to the amino acid sequence of any one of SEQ ID NOs: 139-1138; (d) an amino sequence comprising at least one, two, or three but no more than four modifications, e.g., substitutions (e.g., conservative substitutions), insertions, or deletions, relative to the amino acid sequence of any one of SEQ ID NOs: 139-1138. In some embodiments, the AAV capsid variant does not comprise the amino acid sequence of TGW at positions 593-595, relative to a reference sequence numbered according to the amino acid sequence of SEQ ID NO: 138.

[0022] In yet another aspect, the present disclosure provides an AAV capsid variant comprising: (a) the amino acid sequence of any one of SEQ ID NOs: 139-476; (b) an amino acid sequence comprising at least 3, 4, 5, 6, 7, 8, 9, 10, 11, 12, 13, 14, 15, 16, 17, or 18 consecutive amino acids from any one of SEQ ID NOs: 139-476; or (c) an amino acid sequence comprising at least one, two, or three but no more than four different amino acids, relative to the amino acid sequence of any one of SEQ ID NOs: 139-476; (d) an amino sequence comprising at least one, two, or three but no more than four modifications, e.g., substitutions (e.g., conservative substitutions), insertions, or deletions, relative to the amino acid sequence of any one of SEQ ID NOs: 139-476. In some embodiments, the AAV capsid variant does not comprise the amino acid sequence of TGW at positions 593-595, relative to a reference sequence numbered according to the amino acid sequence of SEQ ID NO: 138.

[0023] In yet another aspect, the present disclosure provides an AAV capsid variant comprising (a) the amino acid sequence of any one of the amino acid sequences provided in Table 1B; (b) an amino acid sequence comprising at least 3, 4, 5, 6, 7, 8, 9, 10, 11, 12, 13, 14, 15, 16, 17, or 18 consecutive amino acids from any one of the amino acid sequences provided in Table 1B; or (c) an amino acid sequence comprising at least one, two, or three but no more than four different amino acids, relative to the amino acid sequence of any one of the amino acid sequences provided in Table 1B; (d) an amino sequence comprising at least one, two, or three but no more than four modifications, e.g., substitutions (e.g., conservative substitutions), insertions, or deletions, relative to the amino acid sequence of any one of the amino acid sequences provided in Table 1B. In some embodiments, the AAV capsid variant does not comprise the amino acid sequence of TGW at positions 593-595, relative to a reference sequence numbered according to the amino acid sequence of SEQ ID NO: 138.

[0024] In yet another aspect, the present disclosure provides an AAV capsid variant comprising (a) the amino acid sequence of any one of SEQ ID NOs: 1139-1172; (b) an amino acid sequence comprising at least 3, 4, 5, 6, 7, 8, 9, 10, 11, 12, 13, 14, or 15 consecutive amino acids from any one of SEQ ID NOs: 1139-1172; or (c) an amino acid sequence comprising at least one, two, or three but no more than four different amino acids, relative to the amino acid sequence of any one of SEQ ID NOs: 1139-1172; (d) an amino sequence comprising at least one, two, or three but no more than four modifications, e.g., substitutions (e.g., conservative substitutions), insertions, or deletions, relative to the amino acid sequence of any one of SEQ ID NOs: 1139-1172.

[0025] In another aspect, the present disclosure provides an AAV capsid polypeptide, e.g., an AAV capsid variant, comprising: the amino acid sequence of any of SEQ ID NO: 1725-3622 or 3648-3659; an amino acid sequence comprising no more than four modifications, e.g., substitutions, relative to the amino acid sequence of any of SEQ ID NO: 1725-3622 or 3648-3659; or at least 3, 4, 5, 6, 7, 8, or 9 consecutive amino acids from the amino acid sequence of any of SEQ ID NO: 1725-3622 or 3648-3659. In some embodiments, the amino acid sequence is present in loop VIII. In some embodiments, the amino acid sequence is present immediately subsequent to position 586, 588, or 589, relative to a reference sequence numbered according to the amino acid sequence of SEQ ID NO: 138. In some embodiments, the AAV capsid variant comprises the amino acid sequence of any one of SEQ ID NOs: 5, 8, 3636-3647, or an amino acid sequence with at least 80% (e.g., at least about 85, 90, 95, 96, 97, 98, or 99%) sequence identity thereto.

[0026] In yet another aspect, the present disclosure provides a peptide comprising (a) the amino acid sequence of any of the sequences provided in Tables 1A, 1B, 10, or 20; (b) an amino acid sequence comprising at least 3, 4, 5, 6, 7, 8, 9, 10, 11, 12, 13, 14, 15, 16, 17, 18, 19, 20 consecutive amino acids from any one of the sequences provided in Tables 1A, 1B, 10, or 20; (c) an amino acid sequence comprising at least one, two, or three but no more than four different amino acids relative to the amino acid sequence of any one of the sequences provided in Tables 1A, 1B, 10, or 20; or (d) an amino acid sequence comprising at least one, two, or three but no more than four modifications, e.g., substitutions (e.g., conservative substitutions), relative to the amino acid sequence of any one of the sequences provided in Tables 1A, 1B, 10, or 20. In some embodiments, the amino acid sequence is not PLN, PLNG (SEQ ID NO: 3678), PLNGA (SEQ ID NO: 3679), PLNGAV (SEQ ID NO: 3680), PLNGAVHL (SEQ ID NO: 3682), and/or PLNGAVHLY (SEQ ID NO: 3648).

[0027] In another aspect, the present disclosure provides a peptide comprising: the amino acid sequence of any of SEQ ID NO: 1725-3622 or 3648-3659; an amino acid sequence comprising no more than four modifications, e.g., substitutions, relative to the amino acid sequence of any of SEQ ID NO: 1725-3622 or 3648-3659; or 3, 4, 5, 6, 7, 8, or 9 consecutive amino acids from the amino acid sequence of any of SEQ ID NO: 1725-3622 or 3648-3659. In some embodiments, the peptide is encoded by the nucleotide sequence of any one of SEQ ID NOs: 3660-3671, or a nucleic acid sequence substantially identical (e.g., having at least 70%, 75%, 80%, 85%, 90%, 92%, 95%, 97%, 98%, or 99% sequence identity) thereto; or a nucleotide sequence comprising at least one, two, three, four, five, six, or seven modifications but no more than ten modifications of the nucleotide sequences of any of SEQ ID NOs: 3660-3671. In some embodiments, the nucleotide sequence encoding the peptide comprises the nucleotide sequence of any one of SEQ ID NOs: 3660-3671, or a nucleic acid sequence substantially identical (e.g., having at least 70%, 75%, 80%, 85%, 90%, 92%, 95%, 97%, 98%, or 99% sequence identity) thereto, or a nucleotide sequence comprising at least one, two, three, four, five, six, or seven modifications but no more than ten modifications of the nucleotide sequences of any of SEQ ID NOs: 3660-3671.

[0028] In another aspect, the present disclosure provides a polynucleotide encoding an AAV capsid variant comprising: (a) the amino acid sequence of any one of SEQ ID NOs: 139-1138; (b) an amino acid sequence comprising at least 3, 4, 5, 6, 7, 8, 9, 10, 11, 12, 13, 14, 15, 16, 17, or 18 consecutive amino acids from any one of SEQ ID NOs: 139-1138; or (c) an amino acid sequence comprising at least one, two, or three but no more than four different amino acids, relative to the amino acid sequence of any one of SEQ ID NOs: 139-1138; (d) an amino sequence comprising at least one, two, or three but no more than four modifications, e.g., substitutions (e.g., conservative substitutions), relative to the amino acid sequence of any one of SEQ ID NOs: 139-1138; optionally wherein: (i) the amino acid sequence of (a), (b), (c), and/or (d) is present immediately subsequent to position 586, 587, 588, 589, 590, 591, 592, 593, 594, or 595, relative to a reference sequence numbered according to the amino acid sequence of SEQ ID NO: 138; or (ii) the amino acid sequence is not PLN, PLNG (SEQ ID NO: 3678), PLNGA (SEQ ID NO: 3679), PLNGAV (SEQ ID NO: 3680), PLNGAVHL (SEQ ID NO: 3682), and/or PLNGAVHLY (SEQ ID NO: 3648).

[0029] In yet another aspect, the present disclosure provides a polynucleotide encoding an AAV capsid polypeptide, e.g., an AAV capsid variant, wherein the AAV capsid variant comprises the amino acid sequence of any of SEQ ID NO: 1725-3622 or 3648-3659; an amino acid sequence comprising no more than four modifications, e.g., substitutions, relative to the amino acid sequence of any of SEQ ID NO: 1725-3622 or 3648-3659; or at least 3, 4, 5, 6, 7, 8, or 9 consecutive amino acids from the amino acid sequence of any of SEQ ID NO: 1725-3622 or 3648-3659. In some embodiments, the polynucleotide comprises the nucleotide sequence of any one of SEQ ID NOs: 4, 7, 3623-3635, or a nucleotide sequence with at least 80% (e.g., at least about 85, 90, 95, 96, 97, 98, or 99%) sequence identity thereto.

[0030] In yet another aspect, the present disclosure provides an AAV particle comprising an AAV capsid polypeptide, e.g., an AAV capsid variant, described herein. In some embodiments, the AAV particle comprises a nucleic acid sequence encoding a payload. In some embodiments, the AAV particle further comprises a viral genome comprising a promoter operably linked to the nucleic acid encoding the payload.

[0031] In yet another aspect, the present disclosure provides a method of making an AAV particle comprising an AAV capsid polypeptide, e.g., an AAV capsid variant, described herein. The method comprises providing a host cell comprising a viral genome and incubating the host cell under conditions suitable to enclose the viral genome in the AAV capsid variant, e.g., an AAV capsid variant described herein, thereby making the AAV particle.

[0032] In yet another aspect, the present disclosure provides a method of delivering a payload to a cell or tissue (e.g., a CNS cell, a CNS tissue, a muscle cell, or a muscle tissue). The method comprising administering an effective amount of an AAV particle comprising an AAV capsid variant described herein.

[0033] In yet another aspect, the present disclosure provides a method of treating a subject having or diagnosed with having a genetic disorder e.g., a monogenic disorder or a polygenic disorder. The method comprising administering an effective amount of an AAV particle comprising an AAV capsid variant described herein.

[0034] In yet another aspect, the present disclosure provides a method of treating a subject having or diagnosed with having a neurological, e.g., a neurodegenerative, disorder. The method comprising administering an effective amount of an AAV particle comprising an AAV capsid variant described herein.

[0035] In yet another aspect, the present disclosure provides a method of treating a subject having or diagnosed with having a muscular disorder or a neuromuscular disorder. The method comprising administering an effective amount of an AAV particle comprising an AAV capsid variant described herein.

[0036] In yet another aspect, the present disclosure provides a method of treating a subject having or diagnosed with having a cardiac disorder, e.g., a cardiac disorder as described herein (e.g., a cardiomyopathy (e.g., arrhythmogenic right ventricular cardiomyopathy, dilated cardiomyopathy, or hypertrophic cardiomyopathy), congestive heart failure, tachycardia (e.g., catecholaminergic polymorphic ventricular tachycardia), ischemic heart disease, and/or myocardial infarction). The method comprising administering an effective amount of an AAV particle comprising an AAV capsid variant described herein.

[0037] In yet another aspect, the present disclosure provides a method of treating a subject having or diagnosed with having a neuro-oncological disorder. The method comprising administering an effective amount of an AAV particle comprising an AAV capsid variant described herein.

[0038] In yet another aspect, the present disclosure provides a pharmaceutical formulation comprising (a) an AAV particle, or a variant thereof, e.g., an AAV particle comprising an AAV capsid variant described herein, (b) a buffering agent (e.g., Tris), (c) a polyether (e.g., glycerol), (d) a salt (e.g., sodium chloride), and (e) a surfactant (e.g., a poloxamer such as Pluronic F-68).

[0039] In yet another aspect, the present disclosure provides a pharmaceutical formulation comprising (a) an AAV particle, or a variant thereof, e.g., an AAV particle comprising an AAV capsid variant described herein, (b) a buffering agent (e.g., Tris), (c) a sugar (e.g., trehalose), (d) a salt (e.g., sodium chloride), and (e) a surfactant (e.g., a poloxamer such as Pluronic F-68).

[0040] In yet another aspect, the present disclosure provides a pharmaceutical formulation comprising: (a) an AAV particle, or a variant thereof, e.g., an AAV particle comprising an AAV capsid variant described herein, 20 mM or about 20 mM Tris, 1% or about 1% glycerol, 62.5 mM or about 62.5 mM sodium chloride, and 0.001% or about 0.001% Pluronic F-68; (b) an AAV particle, or a variant thereof, e.g., an AAV particle comprising an AAV capsid variant described herein, 20 mM or about 20 mM Tris, 2.5% or about 2.5% glycerol, 62.5 mM or about 62.5 mM sodium chloride, and 0.001% or about 0.001% Pluronic F-68; or (c) an AAV particle, or a variant thereof, e.g., an AAV particle comprising an AAV capsid variant described herein, 20 mM or about 20 mM Tris, 5.95% or about 5.95% trehalose, 62.5 mM or about 62.5 mM sodium chloride, and 0.001% or about 0.001% Pluronic F-68.

[0041] In some embodiments, the formulation has a pH of between 7.8-8.4 (e.g., 7.8, 7.9, 8.0, 8.1, 8.2, 8.3, or 8.4). In some embodiments, the formulation has an osmolality of between 250-650 mOsm/kg (e.g., between 250-600, 250-500, 250-450, 250-350, 300-550, 300-500, 300-450, 300-400, 350-400, 400-600, 400-550, 450-600, 450-550). In some embodiments, the formulation remains stable after storage at −80° C., 2-8° C., or room temperature for 1 day, 2 days, 3 days, 4 days, 5 days, 6 days, 1 week, 2 weeks, 3 weeks, 1 month, 2 months, 3 months, 4 months, 5 months, 6 months, or longer (e.g., one or more years), as reflected by a change (increase or decrease) in osmolality, viral titer, occupancy, and/or aggregation, relative to baseline (e.g., prior to storage) of less than 50% (e.g., less than 40%, 30%, 20%, 10%, or 5%).

[0042] In some embodiments, the AAV particle, or variant thereof, in the pharmaceutical formulation is an AAV particle, or variant thereof described herein (e.g., a TTD-001, TTD-002, TTD-003, TTD-004, TTD-005, TTD-006, TTD-007, TTD-008, TTD-009, TTD-010, TTD-011, TTD-012, TTD-013, or TTD-014 capsid variant, as described in Tables 3 and 4, or an AAV capsid variant comprising an amino acid sequence, e.g., as provided in any one of Tables 1A, 1B, 2-7, 10 11, or 20, or a variant thereof).

[0043] Those skilled in the art will recognize or be able to ascertain using no more than routine experimentation, many equivalents to the specific embodiments of the invention described herein. Such equivalents are intended to be encompassed by the following enumerated embodiments.

### ENUMERATED EMBODIMENTS

[0044] 1. An AAV capsid variant, comprising an amino sequence comprising the following formula: [N1]-[N2], wherein:
   [0045] (i) [N1] comprises X1, X2, X3, X4, and X5, wherein:
      [0046] (a) position X1 is: P, Q, A, H, K, L, R, S, or T;
      [0047] (b) position X2 is: L, I, V, H, or R;
      [0048] (c) position X3 is: N, D, I, K, or Y;
      [0049] (d) position X4 is: G, A, C, R, or S; and
      [0050] (e) position X5 is: A, S, T, G, C, D, N, Q, V, or Y; and
   [0051] (ii) [N2] comprises the amino acid sequence of VHLY (SEQ ID NO: 4680), VHIY (SEQ ID NO: 4681), VHVY (SEQ ID NO: 4682), or VHHY (SEQ ID NO: 4683); and/or an amino acid modification, e.g., a conservative substitution, of any of the aforesaid amino acids in (i) and/or (ii);
   [0052] optionally wherein the AAV capsid variant further comprises:
   [0053] (a) one, two, or all of an amino acid other than T at position 593 (e.g., V, L, R, S, A, C, I, K, M, N, P, or Q), an amino acid other than G at position 594 (e.g., S, A, T, M, V, Q, L, H, I, K, N, P, R, or Y), and/or an amino acid other than W at position 595 (e.g., S, P, G, A, Q, L, M, K, C, E, F, H, R, T, V, or Y), relative to a reference sequence numbered according to the amino acid sequence of SEQ ID NO: 138; and/or
   [0054] (b) one, two, or all of an amino acid other than V at position 596 (e.g., D, F, G, L, A, E, or I), an amino acid other than Q at position 597 (e.g., P, K, R, H, E, or L), and/or an amino acid other than N at position 598 (e.g., T, K, H, D, Y, S, I, or P), relative to a reference sequence numbered according to the amino acid sequence of SEQ ID NO: 138.
[0055] 2. An AAV capsid variant comprising one, two, three, four, or all of:
   [0056] (i) an [N1], wherein [N1] is or comprises: PLNGA (SEQ ID NO: 3679), SLNGA (SEQ ID NO: 4684), QLNGA (SEQ ID NO: 4685), ALNGA (SEQ ID NO: 4686), PLNGS (SEQ ID NO: 4687), PVNGA (SEQ ID NO: 4688), PLNGG (SEQ ID NO: 4689), PLNGT (SEQ ID NO: 4690), PLDGA (SEQ ID NO: 4691), QLNGS (SEQ ID NO: 4692), PLNGN (SEQ ID NO: 4693), SLDGA (SEQ ID NO: 4694), HLNGA (SEQ ID NO: 4695), ALNGT (SEQ ID NO: 4696), PINGA (SEQ ID NO: 4697), ALDGA (SEQ ID NO: 4698), PLNCA (SEQ ID NO: 4699), PLNGQ (SEQ ID NO: 4700), PLDSA (SEQ ID NO: 4701), RLDGA (SEQ ID NO: 4702), QLNGN (SEQ ID NO: 4703), PLNGY (SEQ ID NO: 4704), PLDSS (SEQ ID NO: 4705), PLNGC (SEQ ID NO: 4706), PLYGA (SEQ ID NO: 4707), TLNGA (SEQ ID NO: 4708), PVDGA (SEQ ID NO: 4709), PLKGA (SEQ ID NO: 4710), PLNGD (SEQ ID NO: 4711), KLDGA (SEQ ID NO: 4712), PHNGA (SEQ ID NO: 4713), PLNGV (SEQ ID NO: 4714), PLNAA (SEQ ID NO: 4715), QLNGY (SEQ ID NO: 4716), PLDGS (SEQ ID NO: 4717), LLNGA (SEQ ID NO: 4718), PLNRA (SEQ ID NO: 4719), PLIGA (SEQ ID NO: 4720), PRNGA (SEQ ID NO: 4721), or ALNGS (SEQ ID NO: 4722);
   [0057] (ii) an [N2] wherein [N2] is or comprises: VHLY (SEQ ID NO: 4680), VHVY (SEQ ID NO: 4682), VPLY (SEQ ID NO: 4723), VNLY (SEQ ID NO: 4724), VHRY (SEQ ID NO: 4725), VHIY (SEQ ID NO: 4681), VHHY (SEQ ID NO: 4683), FHLY (SEQ ID NO: 4726), LHLY (SEQ ID NO: 4727), DHLY (SEQ ID NO: 4728), VQLY (SEQ ID NO: 4729), IHLY (SEQ ID NO: 4730), VDLY (SEQ ID NO: 4731), AHLY (SEQ ID NO: 4732), VLLY (SEQ ID NO: 4733), GHLY (SEQ ID NO: 4734), VRLY (SEQ ID NO: 4735), or VYLY (SEQ ID NO: 4736);
   [0058] (iii) an [N3] wherein [N3] is or comprises: AQAQ (SEQ ID NO: 4737), SQAQ (SEQ ID NO: 4738), AQPQ (SEQ ID NO: 4739), AQSQ (SEQ ID NO: 4740), AKAQ (SEQ ID NO: 4741), AHAQ (SEQ ID NO: 4742), AQAP (SEQ ID NO: 4743), DQAQ (SEQ ID NO: 4744), APAQ (SEQ ID NO: 4745), AQAK (SEQ ID NO: 4746), AQAH (SEQ ID NO: 4747), AQEQ (SEQ ID NO: 4748), ALAQ (SEQ ID NO: 4749), ARAQ (SEQ ID NO: 4750), or TQAQ (SEQ ID NO: 4751);
   [0059] (iv) an [N4] wherein [N4] is or comprises: TGW, LSP, TGL, TGS, TGG, TAW, TGR, TAS, LSS, TSS, SSL, SSS, TLS, TVS, VSS, TSP, VSP, TMS, VAS, TAL, TTS, TLP, VLP, RGW, LSG, LAS, SSP, LLP, STS, TSA, TTP, SAL, LGS, VTP, VSA, IGW, TGF, LTP, TLA, LSA, TVG, TAP, TMP, TSL, VQS, SSM, SLP, VSQ, RSS, TST, VMS, TTA, TQP, LST, LAP, TVA, RLS, TGY, TSG, TAG, VMP, TSQ, TMA, VGS, TSW, TGV, TGT, TLG, LMP, VQP, TGM, SMS, SQL, IGS, RSV, TAA, STP, LSQ, TAQ, TGP, ASP, VSG, SAP, TLQ, LQP, TAT, TGQ, ATS, IGG, VAA, TSM, TVW, TAM, TGA, VAT, QSP, TQA, VQA, RSP, LAT, VAQ, LAA, RST, RTL, LGT, LMS, LGP, RTS, SQP, VLG, SVS, TMQ, SAV, LAG, SGP, TNS, RLT, TTQ, SAA, TSV, RLG, RAS, STQ, CSP, SAG, ALP, VTS, ISP, SVG, LTS, TTT, RSG, TQL, LNP, TVQ, IAS, LAQ, LSR, LSN, TTG, TSN, SMA, TKS, SVA, TQQ, VQQ, RLP, SAM, TAV, TQW, SSR, TQT, VNS, RSA, LMG, RQS, LVG, VTA, RTT, SMG, VMA, TKP, SAQ, NSP, ATP, VAG, RGS, VKP, RMS, NLP, NAL, RTP, RQL, VQG, VTG, VST, NAS, RVE, ATG, AMS, RNS, VMQ, SMQ, LQQ, TMG, LGQ, TSH, AAP, RSQ, TYS, ITP, VAK, TQM, TKA, SQQ, ISG, VSR, RTA, RML, SQM, VAN, CTP, ISS, AGP, TAK, RTG, LHP, TMT, AQP, QAP, RQP, LKS, NTT, TSK, RYS, KSS, NTP, VGG, IAA, LMA, MAP, VHP, VLS, LAN, ATQ, TNA, TAN, VSN, AAA, AVG, LTA, SAN, RAG, RQG, TLR, LSH, SAF, RAA, IQP, ILG, VNG, SVQ, LSK, TNG, RTQ, TMN, RGG, TTR, VRP, VKA, LAR, NQP, TMK, TYA, TQK, TTK, IAG, TQN, LAH, NTQ, RQQ, RAQ, TKQ, TQH, TNQ, LMQ, VNA, VQT, TQR, VGK, VKQ, IQS, LQR, TMM, VGN, RIG, SAK, RIA, VQN, NVQ, RIP, NAQ, NMQ, TPS, LTN, VTK, PGW, LPP, SPP, TPA, TGC, VPP, TPT, TPW, TPP, RPP, TPQ, TPR, TPG, VPA, VPQ, RPG, KGW, TRW, TAR, IPP, RSL, LVP, KGS, VAP, KGG, KAW, PGS, TRL, or AGW; and/or
   [0060] (v) an [N5] wherein [N5] is or comprises: VQN, VPN, VKN, VQT, VQK, DQN, VQH, GQN, VQI, VHN, FQN, LQN, VLN, VRN, VQS, VQY, AQN, VEN, VQD, IQN, VKK, DKN, VKT, VQP, EQN, GQT, FQK, GHN, or VPH; and/or
   [0061] wherein the AAV capsid variant comprises an amino acid modification, e.g., a conservative substitution, of any of the aforesaid amino acids in (i)-(v).
[0062] 3. The AAV capsid variant of embodiment 1, wherein:
   [0063] (a) position X1 is: P, Q, A, S, or T;
   [0064] (b) position X2 is: L or I;
   [0065] (c) position X3 is: N or D;
   [0066] (d) position X4 is: G or S; and/or
   [0067] (e) position X5 is: A, S, G, T, or N.
[0068] 4. The AAV capsid variant of embodiment 1 or 3, wherein position X1 is P; position X2 is L; position X3 is N; position X4 is G or S; and/or position X5 is A.
[0069] 5. The AAV capsid variant of embodiment 1, 3 or 4, wherein [N1] comprises PL, NG, AL, PI, QL, SL, TL, LN, LD, IN, DG, DS, GA, SA, SS, GG, GN, GS, or GT.
[0070] 6. The AAV capsid variant of any one of embodiments 1 or 3-5, wherein [N1] comprises PLN, ALD, ALN, PIN, PLD, QLN, SLD, SLN, TLN, LNG, LDG, ING, LDS, NGA, DGA, DSA, DSS, NGG, NGN, NGS, NGT.
[0071] 7. The AAV capsid variant of any one of embodiments 1 or 3-6, wherein [N1] comprises PLNG (SEQ ID NO: 3678), ALDG (SEQ ID NO: 4762), ALNG (SEQ ID NO: 4758), PING (SEQ ID NO: 4763), PLDG (SEQ ID NO: 4764), PLDS (SEQ ID NO: 4765), QLNG (SEQ ID NO: 4766), SLDG (SEQ ID NO: 4767), SLNG (SEQ ID NO: 4756), or TLNG (SEQ ID NO: 4754).
[0072] 8. The AAV capsid variant of any one of embodiments embodiment 1-7, wherein [N1] is or comprises PLNGA (SEQ ID NO: 3679), SLNGA (SEQ ID NO: 4684), QLNGA (SEQ ID NO: 4685), ALNGA (SEQ ID NO: 4686), PLNGS (SEQ ID NO: 4687), PVNGA (SEQ ID NO: 4688), PLNGG (SEQ ID NO: 4689), PLNGT (SEQ ID NO: 4690), PLDGA (SEQ ID NO: 4691), QLNGS (SEQ ID NO: 4692), PLNGN (SEQ ID NO: 4693), SLDGA (SEQ ID NO: 4694), HLNGA (SEQ ID NO: 4695), ALNGT (SEQ ID NO: 4696), PINGA (SEQ ID NO: 4697), ALDGA (SEQ ID NO: 4698), PLNCA (SEQ ID NO: 4699), PLNGQ (SEQ ID NO: 4700), PLDSA (SEQ ID NO: 4701), RLDGA (SEQ ID NO: 4702), QLNGN (SEQ ID NO: 4703), PLNGY (SEQ ID NO: 4704), PLDSS (SEQ ID NO: 4705), PLNGC (SEQ ID NO: 4706), PLYGA (SEQ ID NO: 4707), TLNGA (SEQ ID NO: 4708), PVDGA (SEQ ID NO: 4709), PLKGA (SEQ ID NO: 4710), PLNGD (SEQ ID NO: 4711), KLDGA (SEQ ID NO: 4712), PHNGA (SEQ ID NO: 4713), PLNGV (SEQ ID NO: 4714), PLNAA (SEQ ID NO: 4715), QLNGY (SEQ ID NO: 4716), PLDGS (SEQ ID NO: 4717), LLNGA (SEQ ID NO: 4718), PLNRA (SEQ ID NO: 4719), PLIGA (SEQ ID NO: 4720), PRNGA (SEQ ID NO: 4721), or ALNGS (SEQ ID NO: 4722).
[0073] 9. The AAV capsid variant of any one of embodiments 1-8, wherein [N1] is or comprises ALDGA (SEQ ID NO: 4698), ALNGA (SEQ ID NO: 4686), PINGA (SEQ ID NO: 4697), PLDGA (SEQ ID NO: 4691), PLDSA (SEQ ID NO: 4701), PLDSS (SEQ ID NO: 4705), PLNGA (SEQ ID NO: 3679), PLNGG (SEQ ID NO: 4689), PLNGN (SEQ ID NO: 4693), PLNGS (SEQ ID NO: 4687), PLNGT (SEQ ID NO: 4690), QLNGA (SEQ ID NO: 4685), SLDGA (SEQ ID NO: 4694), SLNGA (SEQ ID NO: 4684), or TLNGA (SEQ ID NO: 4708).
[0074] 10. The AAV capsid variant of any one of embodiments 1-9, wherein [N1] is or comprises PLNGA (SEQ ID NO: 3679).
[0075] 11. The AAV capsid variant of any one of embodiment 1 or 3-10, wherein [N1]-[N2] comprises:
   [0076] (i) LDGAVHLY (SEQ ID NO: 4768), LNGAVHLY (SEQ ID NO: 4769), INGAVHLY (SEQ ID NO: 4770), LDSAVHLY (SEQ ID NO: 4771), LDSSVHLY (SEQ ID NO: 4772), LNGGVHLY (SEQ ID NO: 4773), LNGNVHLY (SEQ ID NO: 4774), LNGSVHLY (SEQ ID NO: 4775), LNGTVHLY (SEQ ID NO: 4776), LNGAVHIY (SEQ ID NO: 4777), LDGAVHVY (SEQ ID NO: 4778), or LNGAVHHY (SEQ ID NO: 4779);
   [0077] (ii) an amino acid sequence comprising any portion of an amino acid sequence in (i), e.g., any 2, 3, 4, 5, 6, or 7 amino acids, e.g., consecutive amino acids, thereof;
   [0078] (iii) an amino acid sequence comprising at least one, two, or three but no more than four modifications, e.g., substitutions (e.g., conservative substitutions), insertions, or deletions, relative to any of the amino acid sequences in (i); or
   [0079] (iv) an amino acid sequence comprising at least one, two, or three but no more than four different amino acids, relative to any one of the amino acid sequences in (i).
[0080] 12. The AAV capsid variant of any one of embodiments 1-11, wherein [N1]-[N2] is or comprises:
   [0081] (i) PLNGAVHLY (SEQ ID NO: 3648), ALDGAVHLY (SEQ ID NO: 4780), ALNGAVHLY (SEQ ID NO: 4781), PINGAVHLY (SEQ ID NO: 4782), PLDGAVHLY (SEQ ID NO: 4783), PLDSAVHLY (SEQ ID NO: 4784), PLDSSVHLY (SEQ ID NO: 4785), PLNGGVHLY (SEQ ID NO: 4786), PLNGNVHLY (SEQ ID NO: 4787), PLNGSVHLY (SEQ ID NO: 4788), PLNGTVHLY (SEQ ID NO: 4789), QLNGAVHLY (SEQ ID NO: 4790), SLDGAVHLY (SEQ ID NO: 4791), SLNGAVHLY (SEQ ID NO: 4792), TLNGAVHLY (SEQ ID NO: 4793), PLNGAVHIY (SEQ ID NO: 4794), PLDGAVHVY (SEQ ID NO: 4795), or PLNGAVHHY (SEQ ID NO: 4796);
   [0082] (ii) an amino acid sequence comprising any portion of an amino acid sequence in (i), e.g., any 2, 3, 4, 5, 6, 7, or 8 amino acids, e.g., consecutive amino acids, thereof;
   [0083] (iii) an amino acid sequence comprising at least one, two, or three but no more than four modifications, e.g., substitutions (e.g., conservative substitutions), insertions, or deletions, relative to any of the amino acid sequences in (i); or
   [0084] (iv) an amino acid sequence comprising at least one, two, or three but no more than four different amino acids, relative to any one of the amino acid sequences in (i).
[0085] 13. The AAV capsid variant of any one of embodiments 1-12, wherein [N1]-[N2] is or comprises PLNGAVHLY (SEQ ID NO: 3648).
[0086] 14. The AAV capsid variant of any one of embodiments 1-13, which further comprises one, two, three, or all of an amino acid other than A at position 589 (e.g., D, S, or T), an amino acid other than Q at position 590 (e.g., K, H, L, P, or R), an amino acid other than A at position 591 (e.g., P, E, or R), and/or an amino acid other than Q at position 592 (e.g., H, K, or P), relative to a reference sequence numbered according to the amino acid sequence of SEQ ID NO: 138.
[0087] 15. The AAV capsid variant of any one of embodiments 1-14, which further comprises one, two, three, or all of an amino acid other than A at position 596 (e.g., D, S, or T), an amino acid other than Q at position 597 (e.g., K, H, L, P, or R), an amino acid other than A at position 598 (e.g., P, E, or R), and/or an amino acid other than Q at position 599 (e.g., H, K, or P), numbered according to the amino acid sequence of SEQ ID NO: 5, 8, or 3636.
[0088] 16. The AAV capsid variant of any one of embodiments 1-13, which further comprises:
   [0089] (i) A at position 589, Q at position 590, A at position 591, and/or Q at position 592, numbered according to the amino acid sequence of SEQ ID NO: 138; or
   [0090] (ii) A at position 596, Q at position 597, A at position 598, and/or Q at position 599, numbered according to the amino acid sequence of SEQ ID NO: 5, 8, or 3636.
[0091] 17. The AAV capsid variant of embodiment 1 or 3-16, which further comprises [N3], wherein [N3] comprises X6, X7, X8, and X9, wherein:
   [0092] (a) position X6 is: A, D, S, or T;
   [0093] (b) position X7 is: Q, K, H, L, P, or R;
   [0094] (c) position X8 is: A, P, E, or R; and
   [0095] (d) position X9 is: Q, H, K, or P; and/or an amino acid modification, e.g., a conservative substitution, of any of the aforesaid amino acids in (a)-(d).
[0096] 18. The AAV capsid variant of embodiment 17, wherein:
   [0097] (a) position X6 is: A, D, S;
   [0098] (b) position X7 is: Q or K;
   [0099] (c) position X8 is: A or P; and/or
   [0100] (d) position X9 is: Q.
[0101] 19. The AAV capsid variant of embodiment 17 or 18, wherein [N3] comprises AQ, SQ, AK, DQ, PQ, QA, QP, or KA.
[0102] 20. The AAV capsid variant of any one of embodiments 17-19, wherein [N3] comprises AQA, AQP, SQA, AKA, DQA, QAQ, QPQ, or KAQ.
[0103] 21. The AAV capsid variant of any one of embodiments 2 or 17-20, wherein [N3] is or comprises AQAQ (SEQ ID NO: 4737), SQAQ (SEQ ID NO: 4738), AQPQ (SEQ ID NO: 4739), AQSQ (SEQ ID NO: 4740), AKAQ (SEQ ID NO: 4741), AHAQ (SEQ ID NO: 4742), AQAP (SEQ ID NO: 4743), DQAQ (SEQ ID NO: 4744), APAQ (SEQ ID NO: 4745), AQAK (SEQ ID NO: 4746), AQAH (SEQ ID NO: 4747), AQEQ (SEQ ID NO: 4748), ALAQ (SEQ ID NO: 4749), ARAQ (SEQ ID NO: 4750), or TQAQ (SEQ ID NO: 4751).
[0104] 22. The AAV capsid variant of any one of embodiments 2 or 17-21, wherein [N3] is or comprises AQAQ (SEQ ID NO: 4737), AQPQ (SEQ ID NO: 4739), SQAQ (SEQ ID NO: 4738), AKAQ (SEQ ID NO: 4741), or DQAQ (SEQ ID NO: 4744).
[0105] 23. The AAV capsid variant of any one of embodiments 2 or 17-22, wherein [N3] is or comprises AQAQ (SEQ ID NO: 4737).
[0106] 24. The AAV capsid variant of any one of embodiments 2 or 17-23, wherein [N2]-[N3] is or comprises:
   [0107] (i) VHLYAQAQ (SEQ ID NO: 4797), VHLYAQPQ (SEQ ID NO: 4798), VHLYSQAQ (SEQ ID NO: 4799), VHLYAKAQ (SEQ ID NO: 4800), VHLYDQAQ (SEQ ID NO: 4801), VHIYAQAQ (SEQ ID NO: 4802), VHVYAQAQ (SEQ ID NO: 4803), or VHHYAQAQ (SEQ ID NO: 4804);
   [0108] (ii) an amino acid sequence comprising any portion of an amino acid sequence in (i), e.g., any 2, 3, 4, 5, 6, or 7 amino acids, e.g., consecutive amino acids, thereof;
   [0109] (iii) an amino acid sequence comprising at least one, two, or three but no more than four modifications, e.g., substitutions (e.g., conservative substitutions), insertions, or deletions, relative to any of the amino acid sequences in (i); or
   [0110] (iv) an amino acid sequence comprising at least one, two, or three but no more than four different amino acids, relative to any one of the amino acid sequences in (i).
[0111] 25. The AAV capsid variant of any one of embodiments 2 or 17-24, wherein [N2]-[N3] is or comprises VHLYAQAQ (SEQ ID NO: 4797).
[0112] 26. The AAV capsid variant of any one of embodiments 17-25, wherein [N1]-[N2]-[N3] comprises:
   [0113] (i) ALDGAVHLYAQ (SEQ ID NO: 4805), ALNGAVHLYAQ (SEQ ID NO: 4806), PINGAVHLYAQ (SEQ ID NO: 4807), PLDGAVHLYAQ (SEQ ID NO: 4808), PLDGAVHLYSQ (SEQ ID NO: 4809), PLDSAVHLYAQ (SEQ ID NO: 4810), PLDSSVHLYAQ (SEQ ID NO: 4811), PLNGAVHLYAK (SEQ ID NO: 4812), PLNGAVHLYAQ (SEQ ID NO: 4813), PLNGAVHLYDQ (SEQ ID NO: 4814), PLNGAVHLYSQ (SEQ ID NO: 4815), PLNGGVHLYAQ (SEQ ID NO: 4816), PLNGNVHLYAQ (SEQ ID NO: 4817), PLNGSVHLYAQ (SEQ ID NO: 4818), PLNGTVHLYAQ (SEQ ID NO: 4819), QLNGAVHLYAQ (SEQ ID NO: 4820), SLDGAVHLYAQ (SEQ ID NO: 4821), SLNGAVHLYAQ (SEQ ID NO: 4822), TLNGAVHLYAQ (SEQ ID NO: 4823), PLNGAVHIYAQ (SEQ ID NO: 4824), PLDGAVHVYAQ (SEQ ID NO: 4825), or PLNGAVHHYAQ (SEQ ID NO: 4826);
   [0114] (ii) an amino acid sequence comprising any portion of an amino acid sequence in (i), e.g., any 2, 3, 4, 5, 6, 7, 8, 9, or 10 amino acids, e.g., consecutive amino acids, thereof;
   [0115] (iii) an amino acid sequence comprising at least one, two, or three but no more than four modifications, e.g., substitutions (e.g., conservative substitutions), insertions, or deletions, relative to any of the amino acid sequences in (i); or
   [0116] (iv) an amino acid sequence comprising at least one, two, or three but no more than four different amino acids, relative to any one of the amino acid sequences in (i).
[0117] 27. The AAV capsid variant of any one of embodiments 2 or 17-26, wherein [N1]-[N2]-[N3] is or comprises:
   [0118] (i) PLNGAVHLYAQAQ (SEQ ID NO: 4836), ALDGAVHLYAQAQ (SEQ ID NO: 4827), ALNGAVHLYAQAQ (SEQ ID NO: 4828), PINGAVHLYAQAQ (SEQ ID NO: 4829), PLDGAVHLYAQAQ (SEQ ID NO: 4830), PLDGAVHLYAQPQ (SEQ ID NO: 4831), PLDGAVHLYSQAQ (SEQ ID NO: 4832), PLDSAVHLYAQAQ (SEQ ID NO: 4833), PLDSSVHLYAQAQ (SEQ ID NO: 4834), PLNGAVHLYAKAQ (SEQ ID NO: 4835), PLNGAVHLYAQPQ (SEQ ID NO: 4837), PLNGAVHLYDQAQ (SEQ ID NO: 4838), PLNGAVHLYSQAQ (SEQ ID NO: 4839), PLNGGVHLYAQAQ (SEQ ID NO: 4840), PLNGNVHLYAQAQ (SEQ ID NO: 4841), PLNGSVHLYAQAQ (SEQ ID NO: 4842), PLNGTVHLYAQAQ (SEQ ID NO: 4843), QLNGAVHLYAQAQ (SEQ ID NO: 4844), SLDGAVHLYAQAQ (SEQ ID NO: 4845), SLNGAVHLYAQAQ (SEQ ID NO: 4846), TLNGAVHLYAQAQ (SEQ ID NO: 4847), PLNGAVHIYAQAQ (SEQ ID NO: 4848), PLDGAVHVYAQAQ (SEQ ID NO: 4849), or PLNGAVHHYAQAQ (SEQ ID NO: 4850);
   [0119] (ii) an amino acid sequence comprising any portion of an amino acid sequence in (i), e.g., any 2, 3, 4, 5, 6, 7, 8, 9, 10, 11, or 12 amino acids, e.g., consecutive amino acids, thereof;
   [0120] (iii) an amino acid sequence comprising at least one, two, or three but no more than four modifications, e.g., substitutions (e.g., conservative substitutions), insertions, or deletions, relative to any of the amino acid sequences in (i); or
   [0121] (iv) an amino acid sequence comprising at least one, two, or three but no more than four different amino acids, relative to any one of the amino acid sequences in (i).
[0122] 28. The AAV capsid variant of any one of embodiments 2 or 17-27, wherein [N1]-[N2]-[N3] comprises PLNGAVHLYAQAQ (SEQ ID NO: 4836).
[0123] 29. The AAV capsid variant of any one of embodiments 1-28, which further comprises one, two, or all of an amino acid other than T at position 593 (e.g., V, L, R, S, A, C, I, K, M, N, P, or Q), an amino acid other than G at position 594 (e.g., S, A, T, M, V, Q, L, H, I, K, N, P, R, or Y), and/or an amino acid other than W at position 595 (e.g., S, P, G, A, Q, L, M, K, C, E, F, H, R, T, V, or Y), relative to a reference sequence numbered according to the amino acid sequence of SEQ ID NO: 138.
[0124] 30. The AAV capsid variant of any one of embodiments 1-28, which further comprises one, two, or all of an amino acid other than T at position 600 (e.g., V, L, R, S, A, C, I, K, M, N, P, or Q), an amino acid other than G at position 601 (e.g., S, A, T, M, V, Q, L, H, I, K, N, P, R, or Y), and/or an amino acid other than W at position 602 (e.g., S, P, G, A, Q, L, M, K, C, E, F, H, R, T, V, or Y), relative to a reference sequence numbered according to the amino acid sequence of SEQ ID NO: 5, 8, or 3636.
[0125] 31. The AAV capsid variant of any one of embodiments 1-30, which further comprises one, two, or all of:
   [0126] (i) the amino acid V, L, R, S, A, C, I, K, M, N, P, or Q (e.g., L) at position 593 numbered according to SEQ ID NO: 138 or at position 600 numbered according to SEQ ID NO: 5, 8, or 3636);
   [0127] (ii) the amino acid S, A, T, M, V, Q, L, H, I, K, N, P, R, or Y (e.g., S) at position 594 numbered according to SEQ ID NO: 138, or at position 601 numbered according to SEQ ID NO: 5, 8, or 3636; and/or
   [0128] (iii) the amino acid S, P, G, A, Q, L, M, K, C, E, F, H, R, T, V, or Y (e.g. P) at position 595 numbered according to SEQ ID NO: 138 or at position 602 numbered according to SEQ ID NO: 5, 8, or 3636).
[0129] 32. The AAV capsid variant of any one of embodiments 1-31, which further comprises:
   [0130] (i) the amino acid L at position 593 numbered according to SEQ ID NO: 138 or at position 600 numbered according to SEQ ID NO: 5, 8, or 3636;
   [0131] (ii) the amino acid S at position 594 numbered according to SEQ ID NO: 138, or at position 601 numbered according to SEQ ID NO: 5, 8, or 3636; and
   [0132] (iii) the amino acid P at position 595 numbered according to SEQ ID NO: 138 or at position 602 numbered according to SEQ ID NO: 5, 8, or 3636.
[0133] 33. The AAV capsid variant of any one of embodiments 1 or 3-28, which further comprises:
   [0134] (i) T at position 593, G at position 594, and/or W at position 595, numbered according to SEQ ID NO: 138;
   [0135] (ii) T at position 600, G at position 601, and/or W at position 602, numbered according to SEQ ID NO: 5, 8, or 3636.
[0136] 34. The AAV capsid variant of any one of embodiments 1 or 3-33, which further comprises [N4], wherein [N4] comprises X10, X11, and X12, wherein:
   [0137] (a) position X10 is: T, V, L, R, S, A, C, I, K, M, N, P, or Q;
   [0138] (b) position X11 is: G, S, A, T, M, V, Q, L, H, I, K, N, P, R, or Y; and
   [0139] (c) position X12 is: W, S, P, G, A, Q, L, M, K, C, E, F, H, R, T, V, or Y; and/or an amino acid modification, e.g., a conservative substitution, of any of the aforesaid amino acids in (a)-(c).
[0140] 35. The AAV capsid variant of embodiment 34, wherein:
   [0141] (a) position X10 is: T, V, L, A, R, C, S, I, M, N, P, Q;
   [0142] (b) position X11 is: G, A, S, T, M, Q, V; and/or
   [0143] (c) position X12 is: P, S, W, G, A, Q, T, K, N, R, L, M, H, V, C, or E.
[0144] 36. The AAV capsid variant of embodiment 34 or 25, wherein:
   [0145] (a) position X10 is: T or L;
   [0146] (b) position X11 is: G or S; and/or
   [0147] (c) position X12 is: W or P.
[0148] 37. The AAV capsid variant of any one of embodiments 34-36, wherein [N4] comprises LS, TG, LA, LT, SA, SS, TL, TT, TS, TA, TV, VS, AA, AG, AS, AT, CS, CT, IA, IG, IL, IQ, IS, IT, LG, LH, LK, LM, LN, LQ, MA, NA, NM, NS, NT, NV, QA, RA, RG, RI, RL, RM, RN, RQ, RS, RT, RV, SG, SM, ST, SV, TK, TM, TN, TP, TQ, TR, VA, VG, VH, VK, VL, VM, VN, VQ, VR, VT, PG, LV, SP, GW, AP, GR, AL, AW, GG, GS, GP, QP, QS, AH, AN, AQ, AR, GQ, HP, KS, MG, MP, MQ, MS, NP, QQ, QR, SH, SK, SQ, SR, IP, VE, AK, AM, AV, GA, GC, GT, KA, KP, KQ, LP, MK, MN, MT, NQ, PP, QH, QK, QM, QN, QT, RW, SL, VW, GK, GN, NG, RP, SN, GL, or VP.
[0149] 38. The AAV capsid variant of any one of embodiments 34-37, wherein [N4] is or comprises TGW, LSP, TGL, TGS, TGG, TAW, TGR, TAS, LSS, TSS, SSL, SSS, TLS, TVS, VSS, TSP, VSP, TMS, VAS, TAL, TTS, TLP, VLP, RGW, LSG, LAS, SSP, LLP, STS, TSA, TTP, SAL, LGS, VTP, VSA, IGW, TGF, LTP, TLA, LSA, TVG, TAP, TMP, TSL, VQS, SSM, SLP, VSQ, RSS, TST, VMS, TTA, TQP, LST, LAP, TVA, RLS, TGY, TSG, TAG, VMP, TSQ, TMA, VGS, TSW, TGV, TGT, TLG, LMP, VQP, TGM, SMS, SQL, IGS, RSV, TAA, STP, LSQ, TAQ, TGP, ASP, VSG, SAP, TLQ, LQP, TAT, TGQ, ATS, IGG, VAA, TSM, TVW, TAM, TGA, VAT, QSP, TQA, VQA, RSP, LAT, VAQ, LAA, RST, RTL, LGT, LMS, LGP, RTS, SQP, VLG, SVS, TMQ, SAV, LAG, SGP, TNS, RLT, TTQ, SAA, TSV, RLG, RAS, STQ, CSP, SAG, ALP, VTS, ISP, SVG, LTS, TTT, RSG, TQL, LNP, TVQ, IAS, LAQ, LSR, LSN, TTG, TSN, SMA, TKS, SVA, TQQ, VQQ, RLP, SAM, TAV, TQW, SSR, TQT, VNS, RSA, LMG, RQS, LVG, VTA, RTT, SMG, VMA, TKP, SAQ, NSP, ATP, VAG, RGS, VKP, RMS, NLP, NAL, RTP, RQL, VQG, VTG, VST, NAS, RVE, ATG, AMS, RNS, VMQ, SMQ, LQQ, TMG, LGQ, TSH, AAP, RSQ, TYS, ITP, VAK, TQM, TKA, SQQ, ISG, VSR, RTA, RML, SQM, VAN, CTP, ISS, AGP, TAK, RTG, LHP, TMT, AQP, QAP, RQP, LKS, NTT, TSK, RYS, KSS, NTP, VGG, IAA, LMA, MAP, VHP, VLS, LAN, ATQ, TNA, TAN, VSN, AAA, AVG, LTA, SAN, RAG, RQG, TLR, LSH, SAF, RAA, IQP, ILG, VNG, SVQ, LSK, TNG, RTQ, TMN, RGG, TTR, VRP, VKA, LAR, NQP, TMK, TYA, TQK, TTK, IAG, TQN, LAH, NTQ, RQQ, RAQ, TKQ, TQH, TNQ, LMQ, VNA, VQT, TQR, VGK, VKQ, IQS, LQR, TMM, VGN, RIG, SAK, RIA, VQN, NVQ, RIP, NAQ, NMQ, TPS, LTN, VTK, PGW, LPP, SPP, TPA, TGC, VPP, TPT, TPW, TPP, RPP, TPQ, TPR, TPG, VPA, VPQ, RPG, KGW, TRW, TAR, IPP, RSL, LVP, KGS, VAP, KGG, KAW, PGS, TRL, or AGW.
[0150] 39. The AAV capsid variant of any one of embodiments 2 or 34-38, wherein [N4] is or comprises LSP, TGW, LAA, LTP, SAP, SSP, TGR, TLA, TTS, TSP, TAL, TAW, TGG, TGS, TVS, VSP, VSS, AAP AGP, ASP, ATP, CSP, CTP, IAA, IAG, IAS, IGG, IGS, ILG, IQP, IQS, ISG, ISP, ISS, ITP, LAG, LAH, LAN, LAP, LAQ, LAR, LAS, LAT, LGP, LGQ, LGS, LHP, LKS, LMA, LMG, LMP, LMQ, LMS, LNP, LQP, LQQ, LQR, LSH, LSK, LSQ, LSR, LST, LTA, LTN, LTS, MAP, NAQ, NAS, NMQ, NSP, NTP, NVQ, QAP, RAA, RAQ, RAS, RGG, RGS, RIA, RIG, RIP, RLG, RLS, RMS, RNS, RQP, RSA, RSG, RSP, RSQ, RSS, RST, RTA, RTG, RTL, RTS, RTT, RVE, SAA, SAK, SAM, SAQ, SGP, SMA, SMG, SMQ, SMS, STP, SVA, SVG, TAA, TAG, TAK, TAM, TAN, TAP, TAQ, TAS, TAT, TAV, TGA, TGC, TGP, TGT, TKA, TKP, TKQ, TKS, TLP, TLQ, TMA, TMG, TMK, TMN, TMP, TMQ, TMS, TMT, TNA, TNQ, TNS, TPP, TQH, TQK, TQM, TQN, TQP, TQQ, TQT, TRW, TSA, TSG, TSH, TSK, TSL, TSM, TSQ, TSS, TST, TSV, TTA, TTG, TTK, TTP, TTQ, TTT, TVA, TVG, TVQ, TVW, VAA, VAG, VAK, VAN, VAQ, VAS, VAT, VGG, VGK, VGN, VGS, VHP, VKA, VKP, VKQ, VLP, VLS, VMA, VMQ, VMS, VNA, VNG, VNS, VQA, VQN, VQP, VQQ, VQS, VQT, VRP, VSA, VSG, VSN, VSQ, VSR, VST, VTA, VTG, VTK, VTP, VTS, TGL, PGW, LSG, LSS, or LVP.
[0151] 40. The AAV capsid variant of any one of embodiments 2 or 34-39, wherein [N4] is or comprises TGW.
[0152] 41. The AAV capsid variant of any one of embodiments 2 or 34-39, wherein [N4] is or comprises LSP.
[0153] 42. The AAV capsid variant of any one of embodiments 1-41, which further comprises one, two, or all of an amino acid other than V at position 596 (e.g., D, F, G, L, A, E, or I), an amino acid other than Q at position 597 (e.g., K, R, H, E, L, or P), and/or an amino acid other than N at position 598 (e.g., T, K, H, D, Y, S, I, or P), relative to a reference sequence numbered according to the amino acid sequence of SEQ ID NO: 138.
[0154] 43. The AAV capsid variant of any one of embodiments 1-42, which further comprises one, two, or all of an amino acid other than V at position 603 (e.g., D, F, G, L, A, E, or I), an amino acid other than Q at position 604 (e.g., K, R, H, E, L, or P), and/or an amino acid other than N at position 605 (e.g., T, K, H, D, Y, S, I, or P), relative to a reference sequence numbered according to the amino acid sequence of SEQ ID NO: 5, 8, or 3636.
[0155] 44. The AAV capsid variant of any one of embodiments 1-43, which further comprises one, two, or all of:
   [0156] (i) the amino acid V, D, F, G, L, A, E, or I at position 596 numbered according to SEQ ID NO: 138 or at position 603 numbered according to SEQ ID NO: 5, 8, or 3636;
   [0157] (ii) the amino acid K, R, H, E, L, or P at position 597 numbered according to SEQ ID NO: 138 or at position 604 numbered according to SEQ ID NO: 5, 8, or 3636; and/or
   [0158] (iii) the amino acid N, T, K, H, D, Y, S, I, or P at position 598 numbered according to the amino acid sequence of SEQ ID NO: 138 or at position 605 numbered according to SEQ ID NO: 5, 8, or 3636.
[0159] 45. The AAV capsid variant of any one of embodiments 1-44, which further comprises one, two, or all of:
   [0160] (i) the amino acid V at position 596 numbered according to SEQ ID NO: 138 or at position 603 numbered according to SEQ ID NO: 5, 8, or 3636;
   [0161] (ii) the amino acid K, P, E or H at position 597 numbered according to SEQ ID NO: 138 or at position 604 numbered according to SEQ ID NO: 5, 8, or 3636; and
   [0162] (iii) the amino acid N at position 598 numbered according to the amino acid sequence of SEQ ID NO: 138 or at position 605 numbered according to SEQ ID NO: 5, 8, or 3636.
[0163] 46. The AAV capsid variant of any one of embodiments 1 or 3-45, which further comprises [N5], wherein [N5] comprises X13, X14, and X15, wherein:
   [0164] (a) position X13 is: V, D, F, G, L, A, E, or I;
   [0165] (b) position X14 is: Q, K, R, H, E, L, or P; and
   [0166] (c) position X15 is: N, T, K, H, D, Y, S, I, or P; and/or an amino acid modification, e.g., a conservative substitution, of any of the aforesaid amino acids in (a)-(c).
[0167] 47. The AAV capsid variant of embodiment 46, wherein:
   [0168] (a) position X13 is: V, D, A, F, E, G, or L;
   [0169] (b) position X14 is: Q, K, R, L, or P; and/or
   [0170] (c) position X15 is: N, T, K, H, D, I, K, S, or P.
[0171] 48. The AAV capsid variant of embodiment 46 or 47, wherein position X14 is P.
[0172] 49. The AAV capsid variant of embodiment 46 or 47, wherein position X14 is K.
[0173] 50. The AAV capsid variant of embodiment 46 or 47, wherein position X14 is E or H.
[0174] 51. The AAV capsid variant of embodiment 46 or 47, wherein position X14 is Q.
[0175] 52. The AAV capsid variant of any one of embodiments 46-51, wherein [N5] comprises VQ, AQ, DQ, FQ, VL, LQ, EQ, GQ, VP, VR, VK, QN, QS, QT, QK, QH, LN, QI, PN, QD, QP, RN, or KN.
[0176] 53. The AAV capsid variant of any one of embodiments 46-52, wherein [N5] is or comprises VQN, VPN, VKN, VQT, VQK, DQN, VQH, GQN, VQI, VHN, FQN, LQN, VLN, VRN, VQS, VQY, AQN, VEN, VQD, IQN, VKK, DKN, VKT, VQP, EQN, GQT, FQK, GHN, or VPH.
[0177] 54. The AAV capsid variant of any one of embodiments 46-53, wherein [N5] is or comprises VQN, VKN AQN, VQS, DQN, VQT, VQK, VQH, FQN, VLN, LQN, VQI, EQN, GQT, VPN, VQD, VQP, or VRN.
[0178] 55. The AAV capsid variant of any one of embodiments 46-54, wherein [N5] is or comprises VKN, VPN, VEN, or VHN.
[0179] 56. The AAV capsid variant of any one of embodiments 46-54, wherein [N5] is or comprises VQN.
[0180] 57. The AAV capsid variant of any one of embodiments 2 or 46-56, wherein [N4]-[N5] is or comprises:

| | (i) |
|---|---|
| (SEQ ID NO: 4851) | |
| | TGWVQN, |
| (SEQ ID NO: 5000) | |
| | TGWVPN, |
| (SEQ ID NO: 4852) | |
| | LAAVQN, |
| (SEQ ID NO: 4853) | |
| | LTPVQN, |
| (SEQ ID NO: 4854) | |
| | SAPVQN, |
| (SEQ ID NO: 4855) | |
| | SSPVQN, |
| (SEQ ID NO: 4856) | |
| | TGRVQN, |
| (SEQ ID NO: 4857) | |
| | TGWAQN, |
| (SEQ ID NO: 4858) | |
| | TGWVQS, |
| (SEQ ID NO: 4859) | |
| | TLAVQN, |
| (SEQ ID NO: 4860) | |
| | TTSVQN, |
| (SEQ ID NO: 4861) | |
| | TSPVQN, |
| (SEQ ID NO: 4862) | |
| | TALVQN, |
| (SEQ ID NO: 4863) | |
| | TAWVQN, |
| (SEQ ID NO: 4864) | |
| | TGGVQN, |
| (SEQ ID NO: 4865) | |
| | TGSVQN, |
| (SEQ ID NO: 4866) | |
| | TGWDQN, |
| (SEQ ID NO: 4867) | |
| | TVSVQN, |
| (SEQ ID NO: 4868) | |
| | VSPVQN, |
| (SEQ ID NO: 4869) | |
| | VSSVQN, |
| (SEQ ID NO: 4870) | |
| | AAPVQN, |
| (SEQ ID NO: 4871) | |
| | AGPVQN, |
| (SEQ ID NO: 4872) | |
| | ASPVQN, |
| (SEQ ID NO: 4873) | |
| | ATPVQN, |
| (SEQ ID NO: 4874) | |
| | CSPVQN, |
| (SEQ ID NO: 4875) | |
| | CTPVQN, |
| (SEQ ID NO: 4876) | |
| | IAAVQN, |
| (SEQ ID NO: 4877) | |
| | IAGVQN, |
| (SEQ ID NO: 4878) | |
| | IASVQN, |
| (SEQ ID NO: 4879) | |
| | IGGVQN, |
| (SEQ ID NO: 4880) | |
| | IGSVQN, |
| (SEQ ID NO: 4881) | |
| | ILGVQN, |
| (SEQ ID NO: 4882) | |
| | IQPVQN, |
| (SEQ ID NO: 4883) | |
| | IQSVQN, |
| (SEQ ID NO: 4884) | |
| | ISGVQN, |
| (SEQ ID NO: 4885) | |
| | ISPVQN, |
| (SEQ ID NO: 4886) | |
| | ISSVQN, |
| (SEQ ID NO: 4887) | |
| | ITPVQN, |
| (SEQ ID NO: 4888) | |
| | LAGVQN, |
| (SEQ ID NO: 4889) | |
| | LAHVQN, |
| (SEQ ID NO: 4890) | |
| | LANVQN, |
| (SEQ ID NO: 4891) | |
| | LAPVQN, |
| (SEQ ID NO: 4892) | |
| | LAPVQT, |
| (SEQ ID NO: 4893) | |
| | LAQVQN, |
| (SEQ ID NO: 4894) | |
| | LARVQN, |
| (SEQ ID NO: 4895) | |
| | LASVQN, |
| (SEQ ID NO: 4896) | |
| | LATVQN, |
| (SEQ ID NO: 4897) | |
| | LGPVQN, |
| (SEQ ID NO: 4898) | |
| | LGQVQN, |
| (SEQ ID NO: 4899) | |
| | LGSVQN, |
| (SEQ ID NO: 4900) | |
| | LHPVQN, |
| (SEQ ID NO: 4901) | |
| | LKSVQN, |
| (SEQ ID NO: 4902) | |
| | LMAVQN, |
| (SEQ ID NO: 4903) | |
| | LMGVQN, |
| (SEQ ID NO: 4904) | |
| | LMPVQN, |
| (SEQ ID NO: 4905) | |
| | LMQVQN, |
| (SEQ ID NO: 4906) | |
| | LMSVQN, |
| (SEQ ID NO: 4907) | |
| | LNPVQN, |
| (SEQ ID NO: 4908) | |
| | LQPVQN, |
| (SEQ ID NO: 4909) | |
| | LQQVQN, |
| (SEQ ID NO: 4910) | |
| | LQRVQN, |
| (SEQ ID NO: 4911) | |
| | LSHVQN, |
| (SEQ ID NO: 4912) | |
| | LSKVQN, |
| (SEQ ID NO: 4913) | |
| | LSPVQK, |
| (SEQ ID NO: 4914) | |
| | LSPVQN, |
| (SEQ ID NO: 4915) | |
| | LSQVQN, |
| (SEQ ID NO: 4916) | |
| | LSRVQN, |
| (SEQ ID NO: 4917) | |
| | LSTVQN, |
| (SEQ ID NO: 4918) | |
| | LTAVQN, |
| (SEQ ID NO: 4919) | |
| | LTNVQN, |
| (SEQ ID NO: 4920) | |
| | LTSVQN, |
| (SEQ ID NO: 4921) | |
| | MAPVQN, |
| (SEQ ID NO: 4922) | |
| | NAQVQN, |
| (SEQ ID NO: 4923) | |
| | NASVQN, |
| (SEQ ID NO: 4924) | |
| | NMQVQN, |
| (SEQ ID NO: 4925) | |
| | NSPVQN, |
| (SEQ ID NO: 4926) | |
| | NTPVQN, |
| (SEQ ID NO: 4927) | |
| | NVQVQN, |
| (SEQ ID NO: 4928) | |
| | QAPVQN, |
| (SEQ ID NO: 4929) | |
| | RAAVQN, |
| (SEQ ID NO: 4930) | |
| | RAQVQN, |
| (SEQ ID NO: 4931) | |
| | RASVQN, |
| (SEQ ID NO: 4932) | |
| | RGGVQN, |
| (SEQ ID NO: 4933) | |
| | RGSVQN, |
| (SEQ ID NO: 4934) | |
| | RIAVQN, |
| (SEQ ID NO: 4935) | |
| | RIGVQN, |
| (SEQ ID NO: 4936) | |
| | RIPVQN, |
| (SEQ ID NO: 4937) | |
| | RLGVQN, |
| (SEQ ID NO: 4938) | |
| | RLSVQN, |
| (SEQ ID NO: 4939) | |
| | RMSVQN, |
| (SEQ ID NO: 4940) | |
| | RNSVQN, |
| (SEQ ID NO: 4941) | |
| | RQPVQN, |
| (SEQ ID NO: 4942) | |
| | RSAVQN, |
| (SEQ ID NO: 4943) | |
| | RSGVQN, |
| (SEQ ID NO: 4944) | |
| | RSPVQN, |
| (SEQ ID NO: 4945) | |
| | RSQVQN, |
| (SEQ ID NO: 4946) | |
| | RSSVQN, |
| (SEQ ID NO: 4947) | |
| | RSTVQN, |
| (SEQ ID NO: 4948) | |
| | RTAVQN, |
| (SEQ ID NO: 4949) | |
| | RTGVQN, |
| (SEQ ID NO: 4950) | |
| | RTLVQN, |
| (SEQ ID NO: 4951) | |
| | RTSVQN, |
| (SEQ ID NO: 4952) | |
| | RTTVQN, |
| (SEQ ID NO: 4953) | |
| | RVEVQN, |
| (SEQ ID NO: 4954) | |
| | SAAVQN, |
| (SEQ ID NO: 4955) | |
| | SAKVQN, |
| (SEQ ID NO: 4956) | |
| | SAMVQN, |
| (SEQ ID NO: 4957) | |
| | SAQVQN, |
| (SEQ ID NO: 4958) | |
| | SGPVQN, |
| (SEQ ID NO: 4959) | |
| | SMAVQN, |
| (SEQ ID NO: 4960) | |
| | SMGVQN, |
| (SEQ ID NO: 4961) | |
| | SMQVQN, |
| (SEQ ID NO: 4962) | |
| | SMSVQN, |
| (SEQ ID NO: 4963) | |
| | STPVQN, |
| (SEQ ID NO: 4964) | |
| | SVAVQN, |
| (SEQ ID NO: 4965) | |
| | SVGVQN, |
| (SEQ ID NO: 4966) | |
| | TAAVQN, |
| (SEQ ID NO: 4967) | |
| | TAGVQN, |
| (SEQ ID NO: 4968) | |
| | TAKVQN, |
| (SEQ ID NO: 4969) | |
| | TAMVQN, |
| (SEQ ID NO: 4970) | |
| | TANVQN, |
| (SEQ ID NO: 4971) | |
| | TAPVQN, |
| (SEQ ID NO: 4972) | |
| | TAPVQT, |
| (SEQ ID NO: 4973) | |
| | TAQVQN, |
| (SEQ ID NO: 4974) | |
| | TASVQN, |
| (SEQ ID NO: 4975) | |
| | TASVQT, |
| (SEQ ID NO: 4976) | |
| | TATVQN, |
| (SEQ ID NO: 4977) | |
| | TAVVQN, |
| (SEQ ID NO: 4978) | |
| | TAWDQN, |
| (SEQ ID NO: 4979) | |
| | TAWVQH, |
| (SEQ ID NO: 4980) | |
| | TAWVQT, |
| (SEQ ID NO: 4981) | |
| | TGAVQN, |
| (SEQ ID NO: 4982) | |
| | TGCFQN, |
| (SEQ ID NO: 4983) | |
| | TGGAQN, |
| (SEQ ID NO: 4984) | |
| | TGGFQN, |
| (SEQ ID NO: 4985) | |
| | TGGVLN, |
| (SEQ ID NO: 4986) | |
| | TGGVQH, |
| (SEQ ID NO: 4987) | |
| | TGGVQK, |
| (SEQ ID NO: 4988) | |
| | TGGVQT, |
| (SEQ ID NO: 4989) | |
| | TGPVQN, |
| (SEQ ID NO: 4990) | |
| | TGSAQN, |
| (SEQ ID NO: 4991) | |
| | TGSLQN, |
| (SEQ ID NO: 4992) | |
| | TGSVQH, |
| (SEQ ID NO: 4993) | |
| | TGSVQI, |
| (SEQ ID NO: 4994) | |
| | TGSVQS, |
| (SEQ ID NO: 4995) | |
| | TGSVQT, |
| (SEQ ID NO: 4996) | |
| | TGTVQN, |
| (SEQ ID NO: 4997) | |
| | TGWEQN, |
| (SEQ ID NO: 4998) | |
| | TGWFQN, |
| (SEQ ID NO: 4999) | |
| | TGWGQT, |
| (SEQ ID NO: 5001) | |
| | TGWVQD, |
| (SEQ ID NO: 5002) | |
| | TGWVQP, |
| (SEQ ID NO: 5003) | |
| | TGWVQT, |
| (SEQ ID NO: 5004) | |
| | TGWVRN, |
| (SEQ ID NO: 5005) | |
| | TKAVQN, |
| (SEQ ID NO: 5006) | |
| | TKPVQN, |
| (SEQ ID NO: 5007) | |
| | TKQVQN, |
| (SEQ ID NO: 5008) | |
| | TKSVQN, |
| (SEQ ID NO: 5009) | |
| | TLPVQN, |
| (SEQ ID NO: 5010) | |
| | TLQVQN, |
| (SEQ ID NO: 5011) | |
| | TMAVQN, |
| (SEQ ID NO: 5012) | |
| | TMGVQN, |
| (SEQ ID NO: 5013) | |
| | TMKVQN, |
| (SEQ ID NO: 5014) | |
| | TMNVQN, |
| (SEQ ID NO: 5015) | |
| | TMPVQN, |
| (SEQ ID NO: 5016) | |
| | TMQVQN, |
| (SEQ ID NO: 5017) | |
| | TMSVKN, |
| (SEQ ID NO: 5018) | |
| | TMSVQN, |
| (SEQ ID NO: 5019) | |
| | TMSVQT, |
| (SEQ ID NO: 5020) | |
| | TMTVQN, |
| (SEQ ID NO: 5021) | |
| | TNAVQN, |
| (SEQ ID NO: 5022) | |
| | TNQVQN, |
| (SEQ ID NO: 5023) | |
| | TNSVQN, |
| (SEQ ID NO: 5024) | |
| | TPPVQN, |
| (SEQ ID NO: 5025) | |
| | TQHVQN, |
| (SEQ ID NO: 5026) | |
| | TQKVQN, |
| (SEQ ID NO: 5027) | |
| | TQMVQN, |
| (SEQ ID NO: 5028) | |
| | TQNVQN, |
| (SEQ ID NO: 5029) | |
| | TQPVQN, |
| (SEQ ID NO: 5030) | |
| | TQQVQN, |
| (SEQ ID NO: 5031) | |
| | TQTVQN, |
| (SEQ ID NO: 5032) | |
| | TRWDQN, |
| (SEQ ID NO: 5033) | |
| | TSAVQN, |
| (SEQ ID NO: 5034) | |
| | TSGVQN, |
| (SEQ ID NO: 5035) | |
| | TSHVQN, |
| (SEQ ID NO: 5036) | |
| | TSKVQN, |
| (SEQ ID NO: 5037) | |
| | TSLVQN, |
| (SEQ ID NO: 5038) | |
| | TSMVQN, |
| (SEQ ID NO: 5039) | |
| | TSPDQN, |
| (SEQ ID NO: 5040) | |
| | TSQVQN, |
| (SEQ ID NO: 5041) | |
| | TSSVQN, |
| (SEQ ID NO: 5042) | |
| | TSSVQT, |
| (SEQ ID NO: 5043) | |
| | TSTVQN, |
| (SEQ ID NO: 5044) | |
| | TSVVQN, |
| (SEQ ID NO: 5045) | |
| | TTAVQN, |
| (SEQ ID NO: 5046) | |
| | TTGVQN, |
| (SEQ ID NO: 5047) | |
| | TTKVQN, |
| (SEQ ID NO: 5048) | |
| | TTPVQN, |
| (SEQ ID NO: 5049) | |
| | TTPVQT, |
| (SEQ ID NO: 5050) | |
| | TTQVQN, |
| (SEQ ID NO: 5051) | |
| | TTTVQN, |
| (SEQ ID NO: 5052) | |
| | TVAVQN, |
| (SEQ ID NO: 5053) | |
| | TVAVQT, |
| (SEQ ID NO: 5054) | |
| | TVGVQN, |
| (SEQ ID NO: 5055) | |
| | TVQVQN, |
| (SEQ ID NO: 5056) | |
| | TVSVKN, |
| (SEQ ID NO: 5057) | |
| | TVWVQK, |
| (SEQ ID NO: 5058) | |
| | VAAVQN, |
| (SEQ ID NO: 5059) | |
| | VAGVQN, |
| (SEQ ID NO: 5060) | |
| | VAKVQN, |
| (SEQ ID NO: 5061) | |
| | VANVQN, |
| (SEQ ID NO: 5062) | |
| | VAQVQN, |
| (SEQ ID NO: 5063) | |
| | VASVQN, |
| (SEQ ID NO: 5064) | |
| | VATVQN, |
| (SEQ ID NO: 5065) | |
| | VGGVQN, |
| (SEQ ID NO: 5066) | |
| | VGKVQN, |
| (SEQ ID NO: 5067) | |
| | VGNVQN, |
| (SEQ ID NO: 5068) | |
| | VGSVQN, |
| (SEQ ID NO: 5069) | |
| | VHPVQN, |
| (SEQ ID NO: 5070) | |
| | VKAVQN, |
| (SEQ ID NO: 5071) | |
| | VKPVQN, |
| (SEQ ID NO: 5072) | |
| | VKQVQN, |
| (SEQ ID NO: 5073) | |
| | VLPVQN, |
| (SEQ ID NO: 5074) | |
| | VLSVQN, |
| (SEQ ID NO: 5075) | |
| | VMAVQN, |
| (SEQ ID NO: 5076) | |
| | VMQVQN, |
| (SEQ ID NO: 5077) | |
| | VMSVQN, |
| (SEQ ID NO: 5078) | |
| | VNAVQN, |
| (SEQ ID NO: 5079) | |
| | VNGVQN, |
| (SEQ ID NO: 5080) | |
| | VNSVQN, |
| (SEQ ID NO: 5081) | |
| | VQAVQN, |
| (SEQ ID NO: 5082) | |
| | VQNVQN, |
| (SEQ ID NO: 5083) | |
| | VQPVQN, |
| (SEQ ID NO: 5084) | |
| | VQQVQN, |
| (SEQ ID NO: 5085) | |
| | VQSVQN, |
| (SEQ ID NO: 5086) | |
| | VQTVQN, |
| (SEQ ID NO: 5087) | |
| | VRPVQN, |
| (SEQ ID NO: 5088) | |
| | VSAVQN, |
| (SEQ ID NO: 5089) | |
| | VSGVQN, |
| (SEQ ID NO: 5090) | |
| | VSNVQN, |
| (SEQ ID NO: 5091) | |
| | VSPVQT, |
| (SEQ ID NO: 5092) | |
| | VSQVQN, |
| (SEQ ID NO: 5093) | |
| | VSRVQN, |
| (SEQ ID NO: 5094) | |
| | VSSVQK, |
| (SEQ ID NO: 5095) | |
| | VSSVQT, |
| (SEQ ID NO: 5096) | |
| | VSTVQN, |
| (SEQ ID NO: 5097) | |
| | VTAVQN, |
| (SEQ ID NO: 5098) | |
| | VTGVQN, |
| (SEQ ID NO: 5099) | |
| | VTKVQN, |
| (SEQ ID NO: 5100) | |
| | VTPVQN, |
| (SEQ ID NO: 5101) | |
| | VTSVQN, |
| (SEQ ID NO: 5102) | |
| | TGLVQN, |
| (SEQ ID NO: 5103) | |
| | TGWVKN, |
| (SEQ ID NO: 5104) | |
| | PGWVQN, |
| (SEQ ID NO: 5105) | |
| | TGWVQH, |
| (SEQ ID NO: 5106) | |
| | LSGVQN, |
| (SEQ ID NO: 5107) | |
| | LSSVQN. |
| | or |
| (SEQ ID NO: 5108) | |
| | LVPVQN; |

[0181] (ii) an amino acid sequence comprising any portion of an amino acid sequence in (i), e.g., any 2, 3, 4, or 5 amino acids, e.g., consecutive amino acids, thereof;
[0182] (iii) an amino acid sequence comprising at least one, two, or three but no more than four modifications, e.g., substitutions (e.g., conservative substitutions), insertions, or deletions, relative to any of the amino acid sequences in (i); or
[0183] (iv) an amino acid sequence comprising at least one, two, or three but no more than four different amino acids, relative to any one of the amino acid sequences in (i).
[0184] 58. The AAV capsid variant of any one of embodiments 2 or 46-57, wherein [N4]-[N5] is or comprises TGWVQN (SEQ ID NO: 4851), LSPVKN (SEQ ID NO: 5109), or TGWVPN (SEQ ID NO: 5000).
[0185] 59. The AAV capsid variant of embodiment 2 or 46-58, wherein:
   [0186] (i) [N1] is or comprises: PLNGA (SEQ ID NO: 3679), QLNGA (SEQ ID NO: 4685), PLDGA (SEQ ID NO: 4691), PLDSS (SEQ ID NO: 4705), ALNGA (SEQ ID NO: 4686), PLNGS (SEQ ID NO: 4687), PLNGG (SEQ ID NO: 4689), SLNGA (SEQ ID NO: 4684), PLNGN (SEQ ID NO: 4693), PLNGT (SEQ ID NO: 4690), ALDGA (SEQ ID NO: 4698), PLDSA (SEQ ID NO: 4701), SLDGA (SEQ ID NO: 4694), TLNGA (SEQ ID NO: 4708), or PINGA (SEQ ID NO: 4697);
   [0187] (ii) [N2] is or comprises: VHLY (SEQ ID NO: 4680), VHHY (SEQ ID NO: 4683), VHVY (SEQ ID NO: 4682), or VHIY (SEQ ID NO: 4681);
   [0188] (iii) [N3] is or comprises: AQAQ (SEQ ID NO: 4737), AQPQ (SEQ ID NO: 4739), AKAQ (SEQ ID NO: 4741), DQAQ (SEQ ID NO: 4744), or SQAQ (SEQ ID NO: 4738);
   [0189] (iv) [N4] is or comprises: LSP, TGW, TMS, TTK, TGS, TTS, TSP, TMK, VAQ, TGG, TAW, VKQ, SAP, LSK, LAP, LAQ, VAS, TAK, SAK, TGC, TQK, TGR, TVA, SSP, TTQ, TAQ, RIA, RAS, TTP, LAS, LTP, STP, VSQ, TMQ, TSK, VSP, TVQ, VTA, RQP, ISG, VRP, LGP, TNQ, VQQ, VAN, AAP, RST, TMA, IQP, IAS, TVS, RGS, NSP, LQP, VTG, VMQ, SMA, VGK, IQS, CSP, LQR, TPP, VTK, AGP, LAR, TTT, TLQ, VAK, RAA, TVG, LNP, LSQ, TKP, TNA, LAT, VTP, VQA, CTP, TAG, TSQ, TMN, TST, VKP, ASP, VAA, LKS, IAA, TAA, TKA, VSN, TAP, LMP, LHP, RAQ, LTN, RTT, TSV, TLA, RMS, VGN, LMQ, TAT, VHP, ISS, TRW, TMT, RSS, PGW, RTG, VAT, VTS, VSS, TSS, TNS, VKA, SGP, TGP, TAM, TQP, TQQ, VSR, VLP, LGS, VSA, VLS, TQH, QAP, NAQ, ATP, VQP, TTA, LAA, RSG, LMA, TMP, LAN, VST, SAQ, NTP, TGL, TLP, TAV, RLG, RTL, TQM, ITP, TVW, RSA, TAS, TMG, VQS, ISP, VGG, TAL, LAG, RTA, RSP, LAH, TSL, RLS, LMG, SMQ, TQT, VGS, VSG, VMA, IGG, IAG, LSH, VQT, RNS, TKQ, LGQ, NMQ, NVQ, RGG, VMS, TTG, LSR, MAP, ILG, TGT, TSH, RIG, SAM, TSM, SMG, SMS, TSG, TGA, VNS, VAG, IGS, VNG, LSS, LTA, VQN, TKS, SVG, NAS, TSA, TAN, LTS, RSQ, RIP, LVP, RVE, SVA, LSG, LQQ, LST, SAA, RTS, TQN, VNA, or LMS; and/or (v) [N5] is or comprises: VQN, VPN, DQN, VQH, FQN, VQD, VQS, VQT, VRN, AQN, VQP, VKN, VQK, EQN, VQI, LQN, GQT, or VLN.
[0190] 60. The AAV capsid variant of any one of embodiments 1, 2, 8, 14-17, 21, 25, 28, 29-34, 38, 40-46, 48-51, or 53, wherein the amino acid sequence comprises:
   [0191] (i) the amino acid sequence of any of SEQ ID NOs: 139-1138;
   [0192] (ii) an amino acid sequence comprising any portion of an amino acid sequence in (i), e.g., any 2, 3, 4, 5, 6, 7, 8, 9, 10, 11, 12, 13, 14, 15, 16, 17, or 18 amino acids, e.g., consecutive amino acids, thereof;
   [0193] (iii) an amino acid sequence comprising at least one, two, or three but no more than four modifications, e.g., substitutions (e.g., conservative substitutions), insertions, or deletions, relative to any of the amino acid sequences in (i); or
   [0194] (iv) an amino acid sequence comprising at least one, two, or three but no more than four different amino acids, relative to any one of the amino acid sequences in (i).
[0195] 61. The AAV capsid variant of any one of embodiments 1-60, wherein the amino acid sequence comprises:
   [0196] (i) the amino acid sequence of any of SEQ ID NOs: 139-476;
   [0197] (ii) an amino acid sequence comprising any portion of an amino acid sequence in (i), e.g., any 2, 3, 4, 5, 6, 7, 8, 9, 10, 11, 12, 13, 14, 15, 16, 17, or 18 amino acids, e.g., consecutive amino acids, thereof;
   [0198] (iii) an amino acid sequence comprising at least one, two, or three but no more than four modifications, e.g., substitutions (e.g., conservative substitutions), insertions, or deletions, relative to any of the amino acid sequences in (i); or
   [0199] (iv) an amino acid sequence comprising at least one, two, or three but no more than four different amino acids, relative to any one of the amino acid sequences in (i).
[0200] 62. An AAV capsid variant comprising one, two, three, four, or all of:
   [0201] (i) an [N1], wherein [N1] is or comprises: PLNGA (SEQ ID NO: 3679), SLNGA (SEQ ID NO: 4684), QLNGA (SEQ ID NO: 4685), ALNGA (SEQ ID NO: 4686), PLNGS (SEQ ID NO: 4687), PVNGA (SEQ ID NO: 4688), PLNGG (SEQ ID NO: 4689), PLNGT (SEQ ID NO: 4690), PLDGA (SEQ ID NO: 4691), QLNGS (SEQ ID NO: 4692), PLNGN (SEQ ID NO: 4693), SLDGA (SEQ ID NO: 4694), HLNGA (SEQ ID NO: 4695), ALNGT (SEQ ID NO: 4696), PINGA (SEQ ID NO: 4697), ALDGA (SEQ ID NO: 4698), PLNCA (SEQ ID NO: 4699), PLNGQ (SEQ ID NO: 4700), PLDSA (SEQ ID NO: 4701), RLDGA (SEQ ID NO: 4702), QLNGN (SEQ ID NO: 4703), PLNGY (SEQ ID NO: 4704), or PLDSS (SEQ ID NO: 4705);
   [0202] (ii) an [N2] wherein [N2] is or comprises: VHLY (SEQ ID NO: 4680) or VHVY (SEQ ID NO: 4682);
   [0203] (iii) an [N3] wherein [N3] is or comprises: AQAQ (SEQ ID NO: 4737), SQAQ (SEQ ID NO: 4738), AQPQ (SEQ ID NO: 4739), or AQSQ (SEQ ID NO: 4740);
   [0204] (iv) an [N4] wherein [N4] is or comprises: TGW, TGL, TGS, TGG, TAW, TGR, TAS, LSS, TSS, SSL, SSS, TLS, TVS, VSS, TSP, VSP, TMS, LSP, VAS, TAL, TTS, TLP, VLP, RGW, LSG, LAS, SSP, LLP, STS, TSA, TTP, SAL, LGS, VTP, VSA, IGW, TGF, LTP, TLA, LSA, TVG, TAP, TMP, TSL, VQS, SSM, SLP, VSQ, RSS, TST, VMS, TTA, TQP, LST, LAP, TVA, RLS, TGY, TSG, TAG, VMP, TSQ, TMA, VGS, TSW, TGV, TGT, TLG, LMP, VQP, TGM, SMS, SQL, IGS, RSV, TAA, STP, LSQ, TAQ, TGP, ASP, VSG, SAP, TLQ, LQP, TAT, TGQ, ATS, IGG, VAA, TSM, TVW, TAM, TGA, VAT, QSP, TQA, VQA, RSP, LAT, VAQ, LAA, RST, RTL, LGT, LMS, LGP, RTS, SQP, VLG, SVS, TMQ, SAV, LAG, SGP, TNS, RLT, TTQ, SAA, TSV, RLG, RAS, STQ, CSP, SAG, ALP, VTS, ISP, SVG, LTS, TTT, RSG, TQL, LNP, TVQ, IAS, LAQ, LSR, LSN, TTG, TSN, SMA, TKS, SVA, TQQ, VQQ, RLP, SAM, TAV, TQW, SSR, TQT, VNS, RSA, LMG, RQS, LVG, VTA, RTT, SMG, VMA, TKP, SAQ, NSP, ATP, VAG, RGS, VKP, RMS, NLP, NAL, RTP, RQL, VQG, VTG, VST, NAS, RVE, ATG, AMS, RNS, VMQ, SMQ, LQQ, TMG, LGQ, TSH, AAP, RSQ, TYS, ITP, VAK, TQM, TKA, SQQ, ISG, VSR, RTA, RML, SQM, VAN, CTP, ISS, AGP, TAK, RTG, LHP, TMT, AQP, QAP, RQP, LKS, NTT, TSK, RYS, KSS, NTP, VGG, IAA, LMA, MAP, VHP, VLS, LAN, ATQ, TNA, TAN, VSN, AAA, AVG, LTA, SAN, RAG, RQG, TLR, LSH, SAF, RAA, IQP, ILG, VNG, SVQ, LSK, TNG, RTQ, TMN, RGG, TTR, VRP, VKA, LAR, NQP, TMK, TYA, TQK, TTK, IAG, TQN, LAH, NTQ, RQQ, RAQ, TKQ, TQH, TNQ, LMQ, VNA, VQT, TQR, VGK, VKQ, IQS, LQR, TMM, VGN, RIG, SAK, RIA, VQN, NVQ, RIP, NAQ, NMQ, TPS, LTN, VTK, PGW, LPP, SPP, TPA, or TGC; and/or
   [0205] (v) an [N5] wherein [N5] is or comprises: VQN, VKN, VQT, VQK, DQN, VQH, GQN, VQI, VHN, FQN, LQN, VLN, VRN, VQS, VQY, AQN, VEN, or VQD; and/or wherein the AAV capsid variant comprises an amino acid modification, e.g., a conservative substitution, of any of the aforesaid amino acids in (i)-(v).
[0206] 63. The AAV capsid variant of embodiment 2 or 62, wherein:
   [0207] (i) [N1] is or comprises: PLNGA (SEQ ID NO: 3679), SLNGA (SEQ ID NO: 4684), QLNGA (SEQ ID NO: 4685), ALNGA (SEQ ID NO: 4686), PLNGS (SEQ ID NO: 4687), PVNGA (SEQ ID NO: 4688), PLNGG (SEQ ID NO: 4689), PLNGT (SEQ ID NO: 4690), PLDGA (SEQ ID NO: 4691), QLNGS (SEQ ID NO: 4692), PLNGN (SEQ ID NO: 4693), SLDGA (SEQ ID NO: 4694), HLNGA (SEQ ID NO: 4695), ALNGT (SEQ ID NO: 4696), PINGA (SEQ ID NO: 4697), ALDGA (SEQ ID NO: 4698), PLNCA (SEQ ID NO: 4699), PLNGQ (SEQ ID NO: 4700), PLDSA (SEQ ID NO: 4701), RLDGA (SEQ ID NO: 4702), QLNGN (SEQ ID NO: 4703), PLNGY (SEQ ID NO: 4704), or PLDSS (SEQ ID NO: 4705);
   [0208] (ii) [N2] is or comprises: VHLY (SEQ ID NO: 4680) or VHVY (SEQ ID NO: 4682);
   [0209] (iii) [N3] is or comprises: AQAQ (SEQ ID NO: 4737), SQAQ (SEQ ID NO: 4738), AQPQ (SEQ ID NO: 4739), or AQSQ (SEQ ID NO: 4740);
   [0210] (iv) [N4] is or comprises: TGW, TGL, TGS, TGG, TAW, TGR, TAS, LSS, TSS, SSL, SSS, TLS, TVS, VSS, TSP, VSP, TMS, LSP, VAS, TAL, TTS, TLP, VLP, RGW, LSG, LAS, SSP, LLP, STS, TSA, TTP, SAL, LGS, VTP, VSA, IGW, TGF, LTP, TLA, LSA, TVG, TAP, TMP, TSL, VQS, SSM, SLP, VSQ, RSS, TST, VMS, TTA, TQP, LST, LAP, TVA, RLS, TGY, TSG, TAG, VMP, TSQ, TMA, VGS, TSW, TGV, TGT, TLG, LMP, VQP, TGM, SMS, SQL, IGS, RSV, TAA, STP, LSQ, TAQ, TGP, ASP, VSG, SAP, TLQ, LQP, TAT, TGQ, ATS, IGG, VAA, TSM, TVW, TAM, TGA, VAT, QSP, TQA, VQA, RSP, LAT, VAQ, LAA, RST, RTL, LGT, LMS, LGP, RTS, SQP, VLG, SVS, TMQ, SAV, LAG, SGP, TNS, RLT, TTQ, SAA, TSV, RLG, RAS, STQ, CSP, SAG, ALP, VTS, ISP, SVG, LTS, TTT, RSG, TQL, LNP, TVQ, IAS, LAQ, LSR, LSN, TTG, TSN, SMA, TKS, SVA, TQQ, VQQ, RLP, SAM, TAV, TQW, SSR, TQT, VNS, RSA, LMG, RQS, LVG, VTA, RTT, SMG, VMA, TKP, SAQ, NSP, ATP, VAG, RGS, VKP, RMS, NLP, NAL, RTP, RQL, VQG, VTG, VST, NAS, RVE, ATG, AMS, RNS, VMQ, SMQ, LQQ, TMG, LGQ, TSH, AAP, RSQ, TYS, ITP, VAK, TQM, TKA, SQQ, ISG, VSR, RTA, RML, SQM, VAN, CTP, ISS, AGP, TAK, RTG, LHP, TMT, AQP, QAP, RQP, LKS, NTT, TSK, RYS, KSS, NTP, VGG, IAA, LMA, MAP, VHP, VLS, LAN, ATQ, TNA, TAN, VSN, AAA, AVG, LTA, SAN, RAG, RQG, TLR, LSH, SAF, RAA, IQP, ILG, VNG, SVQ, LSK, TNG, RTQ, TMN, RGG, TTR, VRP, VKA, LAR, NQP, TMK, TYA, TQK, TTK, IAG, TQN, LAH, NTQ, RQQ, RAQ, TKQ, TQH, TNQ, LMQ, VNA, VQT, TQR, VGK, VKQ, IQS, LQR, TMM, VGN, RIG, SAK, RIA, VQN, NVQ, RIP, NAQ, NMQ, TPS, LTN, VTK, PGW, LPP, SPP, TPA, or TGC; and/or
   [0211] (v) [N5] is or comprises: VQN, VKN, VQT, VQK, DQN, VQH, GQN, VQI, VHN, FQN, LQN, VLN, VRN, VQS, VQY, AQN, VEN, or VQD.
[0212] 64. The AAV capsid variant of any one of embodiments 1, 2, 9, 19, 42, or 63, wherein the amino acid sequence comprises:
   [0213] (i) the amino acid sequence of any of SEQ ID NOs: 140, 142-144, 148-150, 154-158, 160, 161, 163, 165, 166, 168, 170, 171, 173-175, 177-179, 181, 182, 184-197, 199-214, 218-222, 224, 225, 227-241, 243-253, 255-262, 265, 267, 268, 270, 271, 273, 274, 276, 277, 279, 282, 284-286, 288-296, 300-310, 312, 315, 317, 318, 320-323, 326, 327, 331, 332, 334, 336, 337, 339, 340, 341, 343, 344, 346, 349, 351, 352, 356-363, 365-367, 369, 370, 372-376, 378-381, 383-389, 392, 393, 395, 397-400, 404, 407, 408, 411, 412, 415, 417, 420-430, 432, 433, 435-438, 441, 442, 446-448, 451-453, 456, 458, 460, 461, 465, 467-469, 471-473, 475, 476, 478, 480, 482, 485, 488, 490, 492, 493, 495, 498, 500-503, 505, 507, 509, 510, 517, 522-526, 528, 535-538, 540, 543-545, 547, 551, 552, 557, 559, 561, 564, 568, 570, 572-574, 577, 585-588, 592-594, 596, 601, 602, 605, 612, 616, 619, 622, 624, 627, 628, 635, 640, 641, 646, 658, 660, 665, 666, 675, 678, 680, 683, 684, 689, 693, 695, 707, 711, 718, 719, 724, 727, 735, 740, 748, 751, 755, 758, 759, 765, 766, 768, 778, 783, 787, 791, 797, 801, 804, 817, 821, 832, 841, 852, 856, 861, 862, 864, 894, 906, 911, 913, 924, 929, 945, 959, 961, 970, 975, 980, 983, 988, 992, 1009, 1015, 1019, 1027, 1032, 1036, 1038, 1047, 1051, 1061, 1077, 1081, 1095, or 1113;
   [0214] (ii) an amino acid sequence comprising any portion of an amino acid sequence in (i), e.g., any 2, 3, 4, 5, 6, 7, 8, 9, 10, 11, 12, 13, 14, 15, 16, 17, or 18 amino acids, e.g., consecutive amino acids, thereof;
   [0215] (iii) an amino acid sequence comprising at least one, two, or three but no more than four modifications, e.g., substitutions (e.g., conservative substitutions), insertions, or deletions, relative to any of the amino acid sequences in (i); or
   [0216] (iv) an amino acid sequence comprising at least one, two, or three but no more than four different amino acids, relative to any one of the amino acid sequences in (i).
[0217] 65. The AAV capsid variant of any one of embodiments 1-64, wherein [N1]-[N2]-[N3]-[N4]-[N5] is or comprises the amino acid sequence of PLNGAVHLYAQAQTGWVPN (SEQ ID NO: 314).
[0218] 66. The AAV capsid variant of any one of embodiments 1-64, wherein [N1]-[N2]-[N3]-[N4]-[N5] is or comprises the amino acid sequence of PLNGAVHLYAQAQLSPVKN (SEQ ID NO: 566).
[0219] 67. The AAV capsid variant of any one of embodiments 1-64, wherein [N1]-[N2]-[N3]-[N4]-[N5] is or comprises the amino acid sequence of PLNGAVHLYAQAQTGWVQN (SEQ ID NO: 476).
[0220] 68. The AAV capsid variant of any one of embodiments 1-64, wherein [N1]-[N2]-[N3]-[N4]-[N5] is or comprises the amino acid sequence of:
   [0221] (i) the amino acid sequence of any of SEQ ID NOs: 14-17, 40-136, 314, 325, 491, 499, 529, 558, 566, 576, 603, 610, 625, 631, 648, 649, 700, 703, 720, 755, 763, 765, 771, 791, 804, 816, 818, 819, 828, 859, 864, 871, 885, 946, 960, 966, 978, 979, 1016, 1033, 1032, 1037, 1058, 1081, 1100, 1122, or 1174-1193;
   [0222] (ii) an amino acid sequence comprising any portion of an amino acid sequence in (i), e.g., any 2, 3, 4, 5, 6, 7, 8, 9, 10, 11, 12, 13, 14, 15, 16, 17, or 18 amino acids, e.g., consecutive amino acids, thereof;
   [0223] (iii) an amino acid sequence comprising at least one, two, or three but no more than four modifications, e.g., substitutions (e.g., conservative substitutions), insertions, or deletions, relative to any of the amino acid sequences in (i); or
   [0224] (iv) an amino acid sequence comprising at least one, two, or three but no more than four different amino acids, relative to any one of the amino acid sequences in (i).
[0225] 69. The AAV capsid variant of any one of embodiments 1-68, wherein [N1]-[N2] is present in loop VIII.
[0226] 70. The AAV capsid variant of any one of embodiments 2 or 46-69, wherein [N3], [N4], and/or [N5] is present in loop VIII.
[0227] 71. The AAV capsid variant of any one of embodiments 2 or 46-70, wherein [N1]-[N2]-[N3]-[N4]-[N5] is present in loop VIII.
[0228] 72. The AAV capsid variant of any one of embodiments 1-71, which comprises an amino acid other than A at position 587 and/or an amino acid other than Q at position 588, numbered according to SEQ ID NO: 138.
[0229] 73. The AAV capsid variant of any one of embodiments 1-72, which comprises:
   [0230] (i) the amino acid P, Q, A, H, K, L, R, S, or T (e.g., P, Q, A, S, or T) at position 587, numbered according to SEQ ID NO: 138 or 3636; and/or
   [0231] (ii) the amino acid L, I, V, H, or R (e.g., L or I) at position 588, numbered according to SEQ ID NO: 5, 8, 138 or 3636.
[0232] 74. The AAV capsid variant of any one of embodiments 1-73, wherein [N1] is present immediately subsequent to position 586, numbered according to the amino acid sequence of SEQ ID NO: 5, 8, 138, or 3636.
[0233] 75. The AAV capsid variant of any one of embodiments 1-74, wherein [N1] is present immediately subsequent to position 586, and replaces positions 587 and 588 (e.g., A587 and Q588), numbered according to SEQ ID NO: 138.
[0234] 76. The AAV capsid variant of any one of embodiments 1-75, wherein [N1] replaces positions 587 and 588 (e.g., A587 and Q588), numbered according to SEQ ID NO: 138.
[0235] 77. The AAV capsid variant of any one of embodiments 1-76, wherein [N1] corresponds to positions 587-591 of SEQ ID NO: 5, 8, or 3636.
[0236] 78. The AAV capsid variant of any one of embodiments 2 or 46-77, wherein [N1]-[N2]-[N3]-[N4]-[N5] is present immediately subsequent to position 586, numbered according to the amino acid sequence of SEQ ID NO: 5, 8, 138, or 3636.
[0237] 79. The AAV capsid variant of any one of embodiments 1-78, wherein [N2] is present immediately subsequent to [N1].
[0238] 80. The AAV capsid variant of any one of embodiments 1-79, wherein [N2] is present immediately subsequent to [N1], wherein [N1] is present immediately subsequent to position 586, relative to a reference sequence numbered according to the amino acid sequence of SEQ ID NO: 5, 8, 138, or 3636.
[0239] 81. The AAV capsid variant of any one of embodiments 1-80, wherein [N2] is present immediately subsequent to [N1], wherein [N1] is present immediately subsequent to position 586 and replaces positions 587 and 588 (e.g., A587 and Q588), numbered according to SEQ ID NO: 138.
[0240] 82. The AAV capsid variant of any one of embodiments 1-81, wherein [N2] corresponds to positions 592 to 595 of SEQ ID NO: 5, 8, or 3636.
[0241] 83. The AAV capsid variant of any one of embodiments 1-82, wherein [N1]-[N2] replaces positions 587 and 588 (e.g., A587 and Q588), numbered according to SEQ ID NO: 138.
[0242] 84. The AAV capsid variant of any one of embodiments 1-83, wherein [N1]-[N2] is present immediately subsequent to position 586, numbered according to SEQ ID NO: 138.
[0243] 85. The AAV capsid variant of any one of embodiments 1-84, wherein [N1]-[N2] is present immediately subsequent to position 586 and replaces positions 587 and 588 (e.g., A587 and Q588), numbered according to SEQ ID NO: 138.
[0244] 86. The AAV capsid variant of any one of embodiments 1-85, wherein [N1]-[N2] corresponds to positions 587-595 of SEQ ID NO: 5, 8, or 3636.
[0245] 87. The AAV capsid variant of any one of embodiments 2 or 14-86, wherein [N3] is present immediately subsequent to position 588, relative to a reference sequence numbered according to the amino acid sequence of SEQ ID NO: 138.
[0246] 88. The AAV capsid variant of any one of embodiments 2 or 14-87, wherein [N3] replaces positions 589-592 (e.g., A589, Q590, A591, Q592), numbered according to the amino acid sequence of SEQ ID NO: 138.
[0247] 89. The AAV capsid variant of any one of embodiments 2 or 14-87, wherein [N3] is present immediately subsequent to position 588, and replaces positions 589-592 (e.g., A589, Q590, A591, Q592), numbered according to the amino acid sequence of SEQ ID NO: 138.
[0248] 90. The AAV capsid variant of any one of embodiments 2 or 14-89, wherein [N3] corresponds to positions 596-599 of SEQ ID NO: 5, 8, or 3636.
[0249] 91. The AAV capsid variant of any one of embodiments 2 or 14-90, wherein [N1]-[N2]-[N3] is present immediately subsequent to position 586, numbered according to SEQ ID NO: 138.
[0250] 92. The AAV capsid variant of any one of embodiments 2 or 14-91, wherein [N1]-[N2]-[N3] replaces positions 587-592 (e.g., A587, Q588, A589, Q590, A591, Q592), numbered according to SEQ ID NO: 138.
[0251] 93. The AAV capsid variant of any one of embodiments 2 or 14-92, wherein [N1]-[N2]-[N3] is present immediately subsequent to position 586 and replaces positions 587-592 (e.g., A587, Q588, A589, Q590, A591, Q592), numbered according to SEQ ID NO: 138.
[0252] 94. The AAV capsid variant of any one of embodiments 2 or 14-93, wherein [N1]-[N2]-[N3] corresponds to positions 587-599 of SEQ ID NO: 5, 8, or 3636.
[0253] 95. The AAV capsid variant of any one of embodiments 2 or 29-94, wherein [N4] is present immediately subsequent to position 592, relative to a reference sequence numbered according to the amino acid sequence of SEQ ID NO: 138.
[0254] 96. The AAV capsid variant of any one of embodiments 2 or 29-95, wherein [N4] replaces positions 593-595 (e.g., T593, G594, W595), numbered according to the amino acid sequence of SEQ ID NO: 138.
[0255] 97. The AAV capsid variant of any one of embodiments 2 or 29-96, wherein [N4] is present immediately subsequent to position 592, and replaces positions 593-595 (e.g., T593, G594, W595), numbered according to the amino acid sequence of SEQ ID NO: 138.
[0256] 98. The AAV capsid variant of any one of embodiments 2 or 29-97, wherein [N4] corresponds to positions 600-602 of SEQ ID NO: 5, 8, or 3636.
[0257] 99. The AAV capsid variant of any one of embodiments 2 or 29-97, wherein [N3]-[N4] is present immediately subsequent to position 588, numbered according to SEQ ID NO: 138.
[0258] 100. The AAV capsid variant of any one of embodiments 2 or 29-97, wherein [N3]-[N4] replaces positions 589-595 (e.g., A589, Q590, A591, Q592, T593, G594, W595), numbered according to the amino acid sequence of SEQ ID NO: 138.
[0259] 101. The AAV capsid variant of any one of embodiments 2 or 29-100, wherein [N3]-[N4] is present immediately subsequent to 588, and replaces positions 589-595 (e.g., A589, Q590, A591, Q592, T593, G594, W595), numbered according to the amino acid sequence of SEQ ID NO: 138.
[0260] 102. The AAV capsid variant of any one of embodiments 2 or 29-101, wherein [N3]-[N4] corresponds to positions 596-602 of SEQ ID NO: 5, 8, or 3636.
[0261] 103. The AAV capsid variant of any one of embodiments 2 or 29-102, wherein [N1]-[N2]-[N3]-[N4] is present immediately subsequent to position 586, numbered according to SEQ ID NO: 138.
[0262] 104. The AAV capsid variant of any one of embodiments 2 or 29-103, wherein [N1]-[N2]-[N3]-[N4] replaces positions 587-595 (e.g., A587, Q588, A589, Q590, A591, Q592, T593, G594, W595), numbered according to SEQ ID NO: 138.
[0263] 105. The AAV capsid variant of any one of embodiments 2 or 29-104, wherein [N1]-[N2]-[N3]-[N4] is present immediately subsequent to position 586 and replaces positions 587-595 (e.g., A587, Q588, A589, Q590, A591, Q592, T593, G594, W595), numbered according to SEQ ID NO: 138.
[0264] 106. The AAV capsid variant of any one of embodiments 2 or 29-105, wherein [N1]-[N2]-[N3]-[N4] corresponds to positions 587-602 of SEQ ID NO: 5, 8, or 3636.
[0265] 107. The AAV capsid variant of any one of embodiments 2 or 42-106, wherein [N5] is present immediately subsequent to position 595, relative to a reference sequence numbered according to the amino acid sequence of SEQ ID NO: 138.
[0266] 108. The AAV capsid variant of any one of embodiments 2 or 42-107, wherein [N5] replaces positions 596-598 (e.g., V596, Q597, N598), numbered according to the amino acid sequence of SEQ ID NO: 138.
[0267] 109. The AAV capsid variant of any one of embodiments 2 or 42-108, wherein [N5] is present immediately subsequent to position 595, and replaces positions 596-598 (e.g., V596, Q597, N598), numbered according to the amino acid sequence of SEQ ID NO: 138.
[0268] 110. The AAV capsid variant of any one of embodiments 2 or 42-109, wherein [N5] corresponds to positions 603-605 of SEQ ID NO: 5, 8, or 3636.
[0269] 111. The AAV capsid variant of any one of embodiments 2 or 42-110, wherein [N4]-[N5] corresponds to positions 600-605 of SEQ ID NO: 5, 8, or 3636.
[0270] 112. The AAV capsid variant of any one of embodiments 2 or 42-111, wherein [N1]-[N2]-[N3]-[N4]-[N5] replaces positions 587-598 (e.g., A587, Q588, A589, Q590, A591, Q592, T593, G594, W595, V596, Q597, N598), numbered according to SEQ ID NO: 138.
[0271] 113. The AAV capsid variant of any one of embodiments 2 or 42-112, wherein [N1]-[N2]-[N3]-[N4]-[N5] is present immediately subsequent to position 586 and replaces positions 587-598 (e.g., A587, Q588, A589, Q590, A591, Q592, T593, G594, W595, V596, Q597, N598), numbered according to SEQ ID NO: 138.
[0272] 114. The AAV capsid variant of any one of embodiments 2 or 42-113, wherein [N1]-[N2]-[N3]-[N4]-[N5] corresponds to positions 587-605 of SEQ ID NO: 5, 8, or 3636.
[0273] 115. The AAV capsid variant of any one of embodiments 1-114, which comprises from N-terminus to C-terminus, [N1]-[N2].
[0274] 116. The AAV capsid variant of any one of embodiments 2 or 14-115, which comprises from N-terminus to C-terminus, [N1]-[N2]-[N3].
[0275] 117. The AAV capsid variant of any one of embodiments 2 or 29-116, which comprises from N-terminus to C-terminus, [N1]-[N2]-[N3]-[N4].
[0276] 118. The AAV capsid variant of any one of embodiments 2 or 42-117, which comprises from N-terminus to C-terminus, [N1]-[N2]-[N3]-[N4]-[N5].
[0277] 119. An AAV capsid variant comprising [A][B], wherein [A] comprises the amino acid sequence of PLNGA (SEQ ID NO: 3679), and [B] comprises X1, X2, X3, X4, wherein:
   [0278] (i) X1 is: V, I, L, A, F, D, or G;
   [0279] (ii) X2 is: H, N, Q, P, D, L, R, or Y;
   [0280] (iii) X3 is: L, H, I, R, or V; and
   [0281] (iv) X4 is Y; and/or wherein the AAV capsid variant comprises an amino acid modification, e.g., a conservative substitution, of any of the aforesaid amino acids in (i)-(iv);
   [0282] optionally wherein the AAV capsid variant further comprises:
   [0283] (a) one, two, or all of an amino acid other than T at position 593 (e.g., a V, S, L, R, I, A, N, C, Q, M, P, or K), an amino acid other than G at position 594 (e.g., T, M, A, K, S, Q, V, I, R, N, P, L, H, or Y), and/or an amino acid other than W at position 595 (e.g., K, Q, S, P, C, A, G, N, T, R, V, M, H, L, E, F, or Y), relative to a reference sequence numbered according to the amino acid sequence of SEQ ID NO: 138; and/or
   [0284] (b) one, two, or all of an amino acid other than V at position 596 (e.g., a D, F, A, E, L, G, or I), an amino acid other than Q at position 597 (e.g., P, K, R, L, H, or E), and/or an amino acid other than N at position 598 (e.g., H, S, T, P, K, I, D, or Y), relative to a reference sequence numbered according to the amino acid sequence of SEQ ID NO: 138.
[0285] 120. The AAV capsid variant of embodiment 54, wherein:
   [0286] (i) X1 is V;
   [0287] (ii) X2 is H;
   [0288] (iii) X3 is L, H, or I; and
   [0289] (iv) X4 is Y.
[0290] 121. The AAV capsid variant of embodiment 119 or 120, wherein [B] comprises:
   [0291] (i) VH, VN, VQ, IH, LH, VP, VD, AH, FH, DH, VL, GH, VR, VY, LY, HY, IY, RY, HL, HH, HI, NL, QL, PL, DL, HR, LL, RL, HV, or YL; or
   [0292] (ii) VH, LY, HY, IY, HL, HH, or HI.
[0293] 122. The AAV capsid variant of any one of embodiments 119-121, wherein [B] comprises:
   [0294] (i) VHL, VHH, VHI, VNL, VQL, IHL, LHL, VPL, VDL, AHL, VHR, FHL, DHL, VLL, GHL, VRL, VHV, VYL, HLY, HHY, HIY, NLY, QLY, PLY, DLY, HRY, LLY, RLY, HVY, YLY;
   [0295] (ii) VHL, VHH, VHI, HLY, HHY, or HIY.
[0296] 123. The AAV capsid variant of any one of embodiments 119-122, wherein [B] is or comprises:

(i)
(SEQ ID NO: 4680)
VHLY,
(SEQ ID NO: 4683)
VHHY,
(SEQ ID NO: 4681)
VHIY,
(SEQ ID NO: 4724)
VNLY,
(SEQ ID NO: 4729)
VQLY,
(SEQ ID NO: 4730)
IHLY,
(SEQ ID NO: 4727)
LHLY,
(SEQ ID NO: 4723)
VPLY,
(SEQ ID NO: 4731)
VDLY,
(SEQ ID NO: 4732)
AHLY,
(SEQ ID NO: 4725)
VHRY,
(SEQ ID NO: 4726)
FHLY,
(SEQ ID NO: 4728)
DHLY,
(SEQ ID NO: 4733)
VLLY,
(SEQ ID NO: 4734)
GHLY,
(SEQ ID NO: 4735)
VRLY,
(SEQ ID NO: 4682)
VHVY,
or
(SEQ ID NO: 4736)
VYLY;
or
(ii)
(SEQ ID NO: 4680)
VHLY,
(SEQ ID NO: 4683)
VHHY,
or
(SEQ ID NO: 4681)
VHIY.

[0297] 124. The AAV capsid variant of any one of embodiments 119-123, wherein [B] is or comprises VHLY (SEQ ID NO: 4680).
[0298] 125. The AAV capsid variant of any one of embodiments 119-124, wherein [A][B] comprises:

(i)
(SEQ ID NO: 3681)
PLNGAVH,
(SEQ ID NO: 5110)
PLNGAVN,
(SEQ ID NO: 5111)
PLNGAVQ,
(SEQ ID NO: 5112)
PLNGAIH,
(SEQ ID NO: 5113)
PLNGALH,
(SEQ ID NO: 5114)
PLNGAVP,
(SEQ ID NO: 5115)
PLNGAVD,
(SEQ ID NO: 5116)
PLNGAAH,
(SEQ ID NO: 5117)
PLNGAFH,
(SEQ ID NO: 5118)
PLNGADH,
(SEQ ID NO: 5119)
PLNGAVL,
(SEQ ID NO: 5120)
PLNGAGH,
(SEQ ID NO: 5121)
PLNGAVR,
or
(SEQ ID NO: 5122);
PLNGAVY,
or
(ii)
(SEQ ID NO: 3681);
PLNGAVH,

[0299] (iii) an amino acid sequence comprising any portion of an amino acid sequence in (i) or (ii), e.g., any 2, 3, 4, 5, or 6 amino acids, e.g., consecutive amino acids, thereof;
[0300] (iv) an amino acid sequence comprising at least one, two, or three but no more than four modifications, e.g., substitutions (e.g., conservative substitutions), insertions, or deletions, relative to any of the amino acid sequences in (i) or (ii); or
[0301] (v) an amino acid sequence comprising at least one, two, or three but no more than four different amino acids, relative to any one of the amino acid sequences in (i) or (ii).
[0302] 126. The AAV capsid variant of embodiment 119-125, wherein [A][B] is or comprises:

| | (i) |
|---|---|
| (SEQ ID NO: 3648) | |
| | PLNGAVHLY, |
| (SEQ ID NO: 4796) | |
| | PLNGAVHHY, |
| (SEQ ID NO: 4794) | |
| | PLNGAVHIY, |
| (SEQ ID NO: 5123) | |
| | PLNGAVNLY, |
| (SEQ ID NO: 5124) | |
| | PLNGAVQLY, |
| (SEQ ID NO: 5125) | |
| | PLNGAIHLY, |
| (SEQ ID NO: 5126) | |
| | PLNGALHLY, |
| (SEQ ID NO: 5127) | |
| | PLNGAVPLY, |
| (SEQ ID NO: 5128) | |
| | PLNGAVDLY, |
| (SEQ ID NO: 5129) | |
| | PLNGAAHLY, |
| (SEQ ID NO: 5130) | |
| | PLNGAVHRY, |
| (SEQ ID NO: 5131) | |
| | PLNGAFHLY, |
| (SEQ ID NO: 5132) | |
| | PLNGADHLY, |
| (SEQ ID NO: 5133) | |
| | PLNGAVLLY, |
| (SEQ ID NO: 5134) | |
| | PLNGAGHLY, |
| (SEQ ID NO: 5135) | |
| | PLNGAVRLY, |
| (SEQ ID NO: 5136) | |
| | PLNGAVHVY, |
| | or |
| (SEQ ID NO: 5137) | |
| | PLNGAVYLY; |
| | (ii) |
| (SEQ ID NO: 3648) | |
| | PLNGAVHLY, |
| (SEQ ID NO: 4796) | |
| | PLNGAVHHY, |
| | or |
| (SEQ ID NO: 4794) | |
| | PLNGAVHIY; |

[0303] (iii) an amino acid sequence comprising any portion of an amino acid sequence in (i) or (ii), e.g., any 2, 3, 4, 5, 6, 7, or 8 amino acids, e.g., consecutive amino acids, thereof; (iv) an amino acid sequence comprising at least one, two, or three but no more than four modifications, e.g., substitutions (e.g., conservative substitutions), insertions, or deletions, relative to any of the amino acid sequences in (i) or (ii); or
[0304] (v) an amino acid sequence comprising at least one, two, or three but no more than four different amino acids, relative to any one of the amino acid sequences in (i) or (ii).
[0305] 127. The AAV capsid variant of embodiment 119-126, wherein [A][B] is or comprises PLNGAVHLY (SEQ ID NO: 3648).
[0306] 128. The AAV capsid variant of any one of embodiments 119-127, which further comprises one, two, three, or all of an amino acid other than A at position 589 (e.g., D, S, or T), an amino acid other than Q at position 590 (e.g., K, H, L, P, or R), an amino acid other than A at position 591 (e.g., P or E), and/or an amino acid other than Q at position 592 (e.g., H, K, or P), relative to a reference sequence numbered according to the amino acid sequence of SEQ ID NO: 138.
[0307] 129. The AAV capsid variant of any one of embodiments 119-128, which further comprises one, two, three, or all of an amino acid other than A at position 596 (e.g., D, S, or T), an amino acid other than Q at position 597 (e.g., K, H, L, P, or R), an amino acid other than A at position 598 (e.g., P or E), and/or an amino acid other than Q at position 599 (e.g., H, K, or P), relative to a reference sequence numbered according to the amino acid sequence of SEQ ID NO: 5, 8, or 3636.
[0308] 130. The AAV capsid variant of any one of embodiments 119-127, which further comprises:
   [0309] (i) A at position 589, Q at position 590, A at position 591, and/or Q at position 592, numbered according to the amino acid sequence of SEQ ID NO: 138; or
   [0310] (ii) A at position 596, Q at position 597, A at position 598, and/or Q at position 599, numbered according to the amino acid sequence of SEQ ID NO: 5, 8, or 3636.
[0311] 131. The AAV capsid variant of embodiment 119-130, which further comprises [C], wherein [C] comprises X4, X5, X6, and X7, wherein:
   [0312] (a) position X4 is: A, D, S, or T;
   [0313] (b) position X5 is: Q, K, H, L, P, or R;
   [0314] (c) position X6 is: A, P, or E; and
   [0315] (d) position X7 is: Q, H, K, or P; and/or an amino acid modification, e.g., a conservative substitution, of any of the aforesaid amino acids in (a)-(d).
[0316] 132. The AAV capsid variant of embodiment 131, wherein:
   [0317] (a) position X4 is: A, D, or S;
   [0318] (b) position X5 is Q or K;
   [0319] (c) position X6 is A or P; and/or
   [0320] (d) position X7 is Q.
[0321] 133. The AAV capsid variant of embodiment 131 or 132, wherein [C] comprises:
   [0322] (i) AQ, AK, DQ, SQ, AH, AL, AP, AR, TQ, PQ, EQ, QA, QP, KA, HA, QE, LA, PA, or RA; or
   [0323] (ii) AQ, AK, DQ, SQ, PQ, QA, QP, or KA.
[0324] 134. The AAV capsid variant of any one of embodiments 131-133, wherein [C] comprises:
   [0325] (i) AQA, AQP, AKA, DQA, SQA, AHA, AQE, ALA, APA, ARA, TQA, QAQ, QPQ, KAQ, HAQ, QEQ, QAK, LAQ, PAQ, RAQ, QAH, or QAP; or
   [0326] (ii) AQA, AQP, AKA, DQA, SQA, QAQ, QPQ, or KAQ.
[0327] 135. The AAV capsid variant of any one of embodiments 131-134, wherein [C] is or comprises:

(i)
(SEQ ID NO: 4737)
AQAQ,
(SEQ ID NO: 4739)
AQPQ,
(SEQ ID NO: 4741)
AKAQ,
(SEQ ID NO: 4744)
DQAQ,
(SEQ ID NO: 4738)
SQAQ,
(SEQ ID NO: 4742)
AHAQ,
(SEQ ID NO: 4748)
AQEQ,
(SEQ ID NO: 4746)
AQAK,
(SEQ ID NO: 4749)
ALAQ,
(SEQ ID NO: 4745)
APAQ,
(SEQ ID NO: 4750)
ARAQ,
(SEQ ID NO: 4747)
AQAH,
(SEQ ID NO: 4743)
AQAP,
or
(SEQ ID NO: 4751)
TQAQ;
or
(ii)
(SEQ ID NO: 4737)
AQAQ,
(SEQ ID NO: 4739)
AQPQ,
(SEQ ID NO: 4741)
AKAQ,
(SEQ ID NO: 4744)
DQAQ,
or
(SEQ ID NO: 4738)
SQAQ.

[0328] 136. The AAV capsid variant of any one of embodiments 131-135, wherein [C] is or comprises AQAQ (SEQ ID NO: 4737).
[0329] 137. The AAV capsid variant of any one of embodiments 131-136, wherein [B][C] is or comprises:

(i)
(SEQ ID NO: 4797)
VHLYAQAQ,
(SEQ ID NO: 4804)
VHHYAQAQ,
(SEQ ID NO: 4798)
VHLYAQPQ,
(SEQ ID NO: 4800)
VHLYAKAQ,
(SEQ ID NO: 4801)
VHLYDQAQ,
(SEQ ID NO: 4799)
VHLYSQAQ,
(SEQ ID NO: 4802)
VHIYAQAQ,
(SEQ ID NO: 5138)
VHLYAHAQ,
(SEQ ID NO: 5139)
VNLYAQAQ,
(SEQ ID NO: 5140)
VQLYAQAQ,
(SEQ ID NO: 5141)
VHLYAQEQ,
(SEQ ID NO: 5142)
IHLYAQAQ,
(SEQ ID NO: 5143)
LHLYAQAQ,
(SEQ ID NO: 5144)
VPLYAQAQ,
(SEQ ID NO: 5145)
VHLYAQAK,
(SEQ ID NO: 5146)
VDLYAQAQ,
(SEQ ID NO: 5147)
AHLYAQAQ,
(SEQ ID NO: 5148)
VHRYAQAQ,
(SEQ ID NO: 5149)
FHLYAQAQ,
(SEQ ID NO: 5150)
VHLYALAQ,
(SEQ ID NO: 5151)
DHLYAQAQ,
(SEQ ID NO: 5152)
VHLYAPAQ,
(SEQ ID NO: 5153)
VHLYARAQ,
(SEQ ID NO: 5154)
VHLYAQAH,
(SEQ ID NO: 5155)
VLLYAQAQ,
(SEQ ID NO: 5156)
VHLYAQAP,
(SEQ ID NO: 5157)
GHLYAQAQ,
(SEQ ID NO: 5158)
VRLYAQAQ,
(SEQ ID NO: 4803)
VHVYAQAQ,
(SEQ ID NO: 5159)
VYLYAQAQ,
or
(SEQ ID NO: 5160)
VHLYTQAQ;
(ii)
(SEQ ID NO: 4797)
VHLYAQAQ,
(SEQ ID NO: 4804)
VHHYAQAQ,
(SEQ ID NO: 4798)
VHLYAQPQ,
(SEQ ID NO: 4800)
VHLYAKAQ,
(SEQ ID NO: 4801)
VHLYDQAQ,
(SEQ ID NO: 4799)
VHLYSQAQ,
or
(SEQ ID NO: 4802)
VHIYAQAQ;

[0330] (iii) an amino acid sequence comprising any portion of an amino acid sequence in (i) or (ii), e.g., any 2, 3, 4, 5, 6, or 7 amino acids, e.g., consecutive amino acids, thereof;
[0331] (iv) an amino acid sequence comprising at least one, two, or three but no more than four modifications, e.g., substitutions (e.g., conservative substitutions), insertions, or deletions, relative to any of the amino acid sequences in (i) or (ii); or
[0332] (v) an amino acid sequence comprising at least one, two, or three but no more than four different amino acids, relative to any one of the amino acid sequences in (i) or (ii).
[0333] 138. The AAV capsid variant of any one of embodiments 131-137, wherein [B][C] is or comprises VHLYAQAQ (SEQ ID NO: 4797).
[0334] 139. The AAV capsid variant of any one of embodiments 131-138, wherein [A][B][C] comprises:

(i)
(SEQ ID NO: 4813)
PLNGAVHLYAQ,
(SEQ ID NO: 4826)
PLNGAVHHYAQ,
(SEQ ID NO: 4812)
PLNGAVHLYAK,
(SEQ ID NO: 4814)
PLNGAVHLYDQ,
(SEQ ID NO: 4815)
PLNGAVHLYSQ,
(SEQ ID NO: 4824)
PLNGAVHIYAQ,
(SEQ ID NO: 5161)
PLNGAVHLYAH,
(SEQ ID NO: 5162)
PLNGAVNLYAQ,
(SEQ ID NO: 5163)
PLNGAVQLYAQ,
(SEQ ID NO: 5164)
PLNGAIHLYAQ,
(SEQ ID NO: 5165)
PLNGALHLYAQ,
(SEQ ID NO: 5166)
PLNGAVPLYAQ,
(SEQ ID NO: 5167)
PLNGAVDLYAQ,
(SEQ ID NO: 5168)
PLNGAAHLYAQ,
(SEQ ID NO: 5169)
PLNGAVHRYAQ,
(SEQ ID NO: 5170)
PLNGAFHLYAQ,
(SEQ ID NO: 5171)
PLNGAVHLYAL,
(SEQ ID NO: 5172)
PLNGADHLYAQ,
(SEQ ID NO: 5173)
PLNGAVHLYAP,
(SEQ ID NO: 5174)
PLNGAVHLYAR,
(SEQ ID NO: 5175)
PLNGAVLLYAQ,
(SEQ ID NO: 5176)
PLNGAGHLYAQ,
(SEQ ID NO: 5177)
PLNGAVRLYAQ,
(SEQ ID NO: 5178)
PLNGAVHVYAQ,
(SEQ ID NO: 5179)
PLNGAVYLYAQ,
or
(SEQ ID NO: 5180),
PLNGAVHLYTQ;
(ii)
(SEQ ID NO: 4813)
PLNGAVHLYAQ,
(SEQ ID NO: 4826)
PLNGAVHHYAQ,
(SEQ ID NO: 4812)
PLNGAVHLYAK,
(SEQ ID NO: 4814)
PLNGAVHLYDQ,
(SEQ ID NO: 4815)
PLNGAVHLYSQ,
or
(SEQ ID NO: 4824)
PLNGAVHIYAQ;

[0335] (iii) an amino acid sequence comprising any portion of an amino acid sequence in (i) or (ii), e.g., any 2, 3, 4, 5, 6, 7, 8, 9, or 10 amino acids, e.g., consecutive amino acids, thereof; (iv) an amino acid sequence comprising at least one, two, or three but no more than four modifications, e.g., substitutions (e.g., conservative substitutions), insertions, or deletions, relative to any of the amino acid sequences in (i) or (ii); or
[0336] (v) an amino acid sequence comprising at least one, two, or three but no more than four different amino acids, relative to any one of the amino acid sequences in (i) or (ii).
[0337] 140. The AAV capsid variant of any one of embodiments 131-139, wherein [A][B][C] is or comprises:

(i)
(SEQ ID NO: 4836)
PLNGAVHLYAQAQ,
(SEQ ID NO: 4850)
PLNGAVHHYAQAQ,
(SEQ ID NO: 4837)
PLNGAVHLYAQPQ,
(SEQ ID NO: 4835)
PLNGAVHLYAKAQ,
(SEQ ID NO: 4838)
PLNGAVHLYDQAQ,
(SEQ ID NO: 4839)
PLNGAVHLYSQAQ,
(SEQ ID NO: 4848)
PLNGAVHIYAQAQ,
(SEQ ID NO: 5181)
PLNGAVHLYAHAQ,
(SEQ ID NO: 5182)
PLNGAVNLYAQAQ,
(SEQ ID NO: 5183)
PLNGAVQLYAQAQ,
(SEQ ID NO: 5184)
PLNGAVHLYAQEQ,
(SEQ ID NO: 5185)
PLNGAIHLYAQAQ,
(SEQ ID NO: 5186)
PLNGALHLYAQAQ,
(SEQ ID NO: 5187)
PLNGAVPLYAQAQ,
(SEQ ID NO: 5188)
PLNGAVHLYAQAK,
(SEQ ID NO: 5189)
PLNGAVDLYAQAQ,
(SEQ ID NO: 5190)
PLNGAAHLYAQAQ,
(SEQ ID NO: 5191)
PLNGAVHRYAQAQ,
(SEQ ID NO: 5192)
PLNGAFHLYAQAQ,
(SEQ ID NO: 5193)
PLNGAVHLYALAQ,
(SEQ ID NO: 5194)
PLNGADHLYAQAQ,
(SEQ ID NO: 5195)
PLNGAVHLYAPAQ,
(SEQ ID NO: 5196)
PLNGAVHLYARAQ,
(SEQ ID NO: 5197)
PLNGAVHLYAQAH,
(SEQ ID NO: 5198)
PLNGAVLLYAQAQ,
(SEQ ID NO: 5199)
PLNGAVHLYAQAP,
(SEQ ID NO: 5200)
PLNGAGHLYAQAQ,
(SEQ ID NO: 5201)
PLNGAVRLYAQAQ,
(SEQ ID NO: 5202)
PLNGAVHVYAQAQ,
(SEQ ID NO: 5203)
PLNGAVYLYAQAQ,
or
(SEQ ID NO: 5204)
PLNGAVHLYTQAQ;
(ii)
(SEQ ID NO: 4836)
PLNGAVHLYAQAQ,
(SEQ ID NO: 4850)
PLNGAVHHYAQAQ,
(SEQ ID NO: 4837)
PLNGAVHLYAQPQ,
(SEQ ID NO: 4835)
PLNGAVHLYAKAQ,
(SEQ ID NO: 4838)
PLNGAVHLYDQAQ,
(SEQ ID NO: 4839)
PLNGAVHLYSQAQ,
or
(SEQ ID NO: 4848)
PLNGAVHIYAQAQ;

[0338] (iii) an amino acid sequence comprising any portion of an amino acid sequence in (i) or (ii), e.g., any 2, 3, 4, 5, 6, 7, 8, 9, 10, 11, or 12 amino acids, e.g., consecutive amino acids, thereof;
[0339] (iv) an amino acid sequence comprising at least one, two, or three but no more than four modifications, e.g., substitutions (e.g., conservative substitutions), insertions, or deletions, relative to any of the amino acid sequences in (i) or (ii); or
[0340] (v) an amino acid sequence comprising at least one, two, or three but no more than four different amino acids, relative to any one of the amino acid sequences in (i) or (ii).
[0341] 141. The AAV capsid variant of any one of embodiments 131-140, wherein [A][B][C] is or comprises PLNGAVHLYAQAQ (SEQ ID NO: 4836).
[0342] 142. The AAV capsid variants of any one of 119-141, which further comprises one, two, or all of an amino acid other than T at position 593 (e.g., a V, S, L, R, I, A, N, C, Q, M, P, or K), an amino acid other than G at position 594 (e.g., T, M, A, K, S, Q, V, I, R, N, P, L, H, or Y), and/or an amino acid other than W at position 595 (e.g., K, Q, S, P, C, A, G, N, T, R, V, M, H, L, E, F, or Y), relative to a reference sequence numbered according to the amino acid sequence of SEQ ID NO: 138.
[0343] 143. The AAV capsid variants of any one of 119-142, which further comprises one, two, or all of an amino acid other than T at position 600 (e.g., a V, S, L, R, I, A, N, C, Q, M, P, or K), an amino acid other than G at position 601 (e.g., T, M, A, K, S, Q, V, I, R, N, P, L, H, or Y), and/or an amino acid other than W at position 602 (e.g., K, Q, S, P, C, A, G, N, T, R, V, M, H, L, E, F, or Y), relative to a reference sequence numbered according to the amino acid sequence of SEQ ID NO: 5, 8, 3636.
[0344] 144. The AAV capsid variants of any one of 119-143, which further comprises one, two, three or all of:
   [0345] (i) the amino acid V, S, L, R, I, A, N, C, Q, M, P, or K (e.g., L) at position 593 numbered according to SEQ ID NO: 138 or at position 600 numbered according to SEQ ID NO: 5, 8, or 3636);
   [0346] (ii) the amino acid T, M, A, K, S, Q, V, I, R, N, P, L, H, or Y (e.g., S) at position 594 numbered according to SEQ ID NO: 138, or at position 601 numbered according to SEQ ID NO: 5, 8, or 3636; and/or
   [0347] (iii) the amino acid K, Q, S, P, C, A, G, N, T, R, V, M, H, L, E, F, or Y (e.g. P) at position 595 numbered according to SEQ ID NO: 138 or at position 602 numbered according to SEQ ID NO: 5, 8, or 3636).
[0348] 145. The AAV capsid variants of any one of 119-144, which further comprises:
   [0349] (i) the amino acid L at position 593 numbered according to SEQ ID NO: 138 or at position 600 numbered according to SEQ ID NO: 5, 8, or 3636);
   [0350] (ii) the amino acid S at position 594 numbered according to SEQ ID NO: 138, or at position 601 numbered according to SEQ ID NO: 5, 8, or 3636; and
   [0351] (iii) the amino acid P at position 595 numbered according to SEQ ID NO: 138 or at position 602 numbered according to SEQ ID NO: 5, 8, or 3636).
[0352] 146. The AAV capsid variants of any one of 119-141, which further comprises:
   [0353] (i) T at position 593, G at position 594, and/or W at position 595, numbered according to SEQ ID NO: 138;
   [0354] (ii) T at position 600, G at position 601, and/or W at position 602, numbered according to SEQ ID NO: 5, 8, or 3636.
[0355] 147. The AAV capsid variant of any one of embodiments 119-146, which further comprises [D], wherein [D] comprises X8, X9, and X10, wherein:
   [0356] (a) position X8 is: T, V, S, L, R, I, A, N, C, Q, M, P, or K;
   [0357] (b) position X9 is: T, M, A, G, K, S, Q, V, I, R, N, P, L, H, or Y; and
   [0358] (c) position X10 is: K, Q, W, S, P, C, A, G, N, T, R, V, M, H, L, E, F, or Y; and/or an amino acid modification, e.g., a conservative substitution, of any of the aforesaid amino acids in (a)-(c).
[0359] 148. The AAV capsid variant of embodiment 147, wherein:
   [0360] (a) position X8 is: T, V, S, L, R, I, A, N, C, Q, or M;
   [0361] (b) position X9 is: T, M, A, G, K, S, Q, V, I, R, N, P, L, or H; and/or
   [0362] (c) position X10 is: K, Q, W, S, P, C, A, G, N, T, R, V, M, H, L, or E.
[0363] 149. The AAV capsid variant of embodiment 147 or 148, wherein:
   [0364] (a) position X8 is: T or L;
   [0365] (b) position X9 is: G or S; and/or
   [0366] (c) position X10 is: W or P.
[0367] 150. The AAV capsid variant of any one of embodiments 147-149, wherein [D] comprises:
   [0368] (i) TT, TM, VA, TA, TG, VK, SA, LS, LA, TQ, TV, RI, RA, LT, ST, TS, VS, VT, RQ, IS, VR, LG, TN, VQ, AA, RS, IQ, IA, RG, NS, LQ, VM, SM, VG, CS, TP, SS, AG, TL, LN, TK, CT, AS, LK, LM, LH, RT, RM, VH, TR, SG, VL, QA, NA, AT, NT, RL, IT, IG, RN, NM, NV, MA, IL, VN, SV, RV, PG, QS, RY, SQ, NQ, LL, LP, AQ, TY, NL, SP, LV, KG, VP, AV, KS, AM, SL, AL, RP, IP, MK, AW, GS, KQ, AP, SK, AK, GC, QK, MQ, QP, GP, QQ, AN, GK, QR, PP, AR, GG, MS, NP, KP, MN, KA, SN, MP, HP, GN, RW, MT, SR, GW, QH, GL, QM, VW, MG, AH, QT, GR, SH, GQ, GT, GA, NG, QN, VE, MM, QL, QG, YS, GM, LR, AF, PQ, SW, QW, YA, ML, GF, PA, PS, PT, GY, GV, PW, PR; or
   [0369] (ii) TT, TM, VA, TA, TG, VK, SA, LS, LA, TQ, TV, RI, RA, LT, ST, TS, VS, VT, RQ, IS, VR, LG, TN, VQ, AA, RS, IQ, IA, RG, NS, LQ, VM, SM, VG, CS, TP, SS, AG, TL, LN, TK, CT, AS, LK, LM, LH, RT, RM, VH, TR, SG, VL, QA, NA, AT, NT, RL, IT, IG, RN, NM, NV, MA, IL, VN, SV, RV, MK, AQ, AW, GS, KQ, AP, SK, AK, GC, QK, SP, MQ, SQ, QP, RP, GP, NQ, QQ, AN, GK, QS, QR, PP, AR, GG, MS, NP, KP, MN, KS, KA, SN, MP, HP, GN, RW, MT, AM, SR, GW, QH, GL, AV, QM, VW, MG, AL, AH, SL, QT, GR, SH, LP, GQ, GT, GA, NG, QN, IP, or VE.
[0370] 151. The AAV capsid variant of any one of embodiments 147-150, wherein [D] is or comprises:
   [0371] (i) TGW, LSP, TTK, TMK, VAQ, TAW, TGS, VKQ, SAP, LSK, LAP, LAQ, TAK, SAK, TGC, TQK, TVA, TTQ, TAQ, RIA, RAS, TTP, LTP, STP, TSP, TMQ, TSK, VSQ, VSP, TVQ, VTA, RQP, ISG, VRP, LGP, TNQ, VQQ, VAN, AAP, RST, TMA, IQP, IAS, TVS, RGS, NSP, LQP, VTG, VMQ, SMA, VGK, IQS, CSP, LQR, TPP, VTK, SSP, AGP, LAR, TTT, TGG, TLQ, TMS, VAK, RAA, TVG, LNP, LSQ, TKP, TNA, LAT, VTP, VQA, TTS, CTP, TAG, TSQ, TMN, TST, VKP, ASP, VAA, LKS, IAA, TAA, TKA, VSN, TAP, LMP, LHP, RAQ, LTN, RTT, TSV, RMS, VGN, LMQ, TAT, VHP, ISS, VAS, TRW, TMT, RSS, RTG, VAT, VTS, VSS, TNS, VKA, SGP, TGP, TAM, TQP, TQQ, VSR, VSA, VLS, TQH, LAS, QAP, NAQ, ATP, VQP, TTA, LAA, RSG, LMA, TMP, LAN, VST, SAQ, NTP, TGL, TAV, RLG, RTL, TQM, ITP, TVW, RSA, TAS, TMG, VQS, ISP, VGG, TAL, LAG, RTA, RSP, TLA, LAH, TSL, RLS, LMG, SMQ, TQT, VGS, VSG, VMA, IGG, IAG, TGR, LSH, VQT, RNS, TLP, TKQ, LGQ, NMQ, NVQ, RGG, VMS, TTG, LSR, MAP, ILG, TGT, TSS, TSH, RIG, SAM, TSM, SMG, SMS, TSG, TGA, VNS, VAG, IGS, LGS, VNG, LTA, VQN, TKS, SVG, NAS, TSA, TAN, LTS, RSQ, RIP, RVE, VLP, SVA, LQQ, LST, SAA, RTS, TQN, VNA, LMS, TMM, RSV, TQL, RTP, RQQ, VQG, PGW, STQ, QSP, RYS, TQR, SAG, RQS, SQP, STS, VLG, NQP, LGT, RAG, TGM, LSN, RLP, RQG, RLT, TLR, SAF, SVQ, LLP, RTQ, LPP, AQP, TPQ, TSW, NTT, TTR, TQW, NTQ, TYA, TLS, NLP, ATS, ATQ, LSS, TQA, VMP, NAL, RML, RQL, TLG, TGF, SAL, SQL, LSA, TGQ, TNG, AAA, SAV, LSG, SSR, SPP, LVG, TPA, KGW, VPP, ATG, SAN, SQQ, SSM, AVG, VAP, TPS, RGW, SSL, TYS, TPT, IGW, KSS, TGY, RSL, SVS, TSN, SQM, VPA, AMS, TPG, TGV, VPQ, SLP, ALP, TPW, TPR, SSS, RPP, IPP, AGW, or RPG; or
   [0372] (ii) TTK, TMK, VAQ, TAW, TGS, VKQ, SAP, LSK, LAP, LAQ, TAK, SAK, TGC, TQK, TVA, LSP, TTQ, TAQ, RIA, RAS, TTP, LTP, STP, TSP, TMQ, TSK, VSQ, VSP, TVQ, VTA, RQP, ISG, VRP, LGP, TNQ, VQQ, VAN, AAP, RST, TMA, IQP, IAS, TVS, RGS, NSP, LQP, VTG, VMQ, SMA, VGK, IQS, CSP, LQR, TPP, VTK, SSP, AGP, LAR, TTT, TGG, TLQ, TMS, VAK, RAA, TVG, LNP, LSQ, TKP, TNA, LAT, VTP, VQA, TTS, CTP, TAG, TSQ, TMN, TST, VKP, ASP, VAA, LKS, IAA, TAA, TKA, VSN, TAP, LMP, LHP, RAQ, LTN, RTT, TSV, RMS, VGN, LMQ, TAT, VHP, ISS, VAS, TRW, TMT, RSS, RTG, VAT, VTS, VSS, TNS, VKA, SGP, TGP, TAM, TQP, TQQ, VSR, TGW, VSA, VLS, TQH, LAS, QAP, NAQ, ATP, VQP, TTA, LAA, RSG, LMA, TMP, LAN, VST, SAQ, NTP, TGL, TAV, RLG, RTL, TQM, ITP, TVW, RSA, TAS, TMG, VQS, ISP, VGG, TAL, LAG, RTA, RSP, TLA, LAH, TSL, RLS, LMG, SMQ, TQT, VGS, VSG, VMA, IGG, IAG, TGR, LSH, VQT, RNS, TLP, TKQ, LGQ, NMQ, NVQ, RGG, VMS, TTG, LSR, MAP, ILG, TGT, TSS, TSH, RIG, SAM, TSM, SMG, SMS, TSG, TGA, VNS, VAG, IGS, LGS, VNG, LTA, VQN, TKS, SVG, NAS, TSA, TAN, LTS, RSQ, RIP, RVE, VLP, SVA, LQQ, LST, SAA, RTS, TQN, VNA, or LMS.
[0373] 152. The AAV capsid variant of any one of embodiments 147-151, wherein [D] is or comprises TGW.
[0374] 153. The AAV capsid variant of any one of embodiments 147-151, wherein [D] is or comprises LSP.
[0375] 154. The AAV capsid variant of any one of embodiments 119-153, which further comprises one, two, or all of an amino acid other than V at position 596 (e.g., D, F, A, E, L, G, or I), an amino acid other than Q at position 597 (e.g., R, P, K, L, H, or E), and/or an amino acid other than N at position 598 (e.g., H, S, T, P, K, I, D, or Y), relative to a reference sequence numbered according to the amino acid sequence of SEQ ID NO: 138.
[0376] 155. The AAV capsid variant of any one of embodiments 119-154, which further comprises one, two, or all of an amino acid other than V at position 603 (e.g., D, F, A, E, L, G, or I), an amino acid other than Q at position 604 (e.g., R, P, K, L, H, or E), and/or an amino acid other than N at position 605 (e.g., H, S, T, P, K, I, D, or Y), relative to a reference sequence numbered according to the amino acid sequence of SEQ ID NO: 5, 8, or 3636.
[0377] 156. The AAV capsid variant of any one of embodiments 119-155, which further comprises one, two, or all of:
   [0378] (i) the amino acid D, F, A, E, L, G, or I at position 596, numbered according to SEQ ID NO: 138, or at position 603 numbered according to SEQ ID NO: 5, 8, or 3636;
   [0379] (ii) the amino acid R, P, K, L, H, or E at position 597, numbered according to SEQ ID NO: 138, or at position 604 numbered according to SEQ ID NO: 5, 8, or 3636; and/or
   [0380] (iii) the amino acid H, S, T, P, K, I, D, or Y at position 598, numbered according to SEQ ID NO: 138, or at position 605 numbered according to SEQ ID NO: 5, 8, or 3636.
[0381] 157. The AAV capsid variant of any one of embodiments 119-156, which further comprises P, K, E, or H at position 597 numbered according to SEQ ID NO: 138 or at position 604, numbered according to SEQ ID NO: 5, 8, or 3636.
[0382] 158. The AAV capsid variant of any one of embodiments 119-157, which further comprises one, two, or all of:
   [0383] (i) the amino acid V at position 596 numbered according to SEQ ID NO: 138 or at position 603 numbered according to SEQ ID NO: 5, 8, or 3636;
   [0384] (ii) the amino acid K, P, E or H at position 597 numbered according to SEQ ID NO: 138 or at position 604 numbered according to SEQ ID NO: 5, 8, or 3636; and
   [0385] (iii) the amino acid N at position 598 numbered according to the amino acid sequence of SEQ ID NO: 138 or at position 605 numbered according to SEQ ID NO: 5, 8, or 3636.
[0386] 159. The AAV capsid variant of any one of embodiments 119-158, which further comprises [E], wherein [E] comprises X11, X12, and X13, wherein:
   [0387] (a) position X11 is: V, D, F, A, E, L, G, or I;
   [0388] (b) position X12 is: Q, R, P, K, L, H, or E; and
   [0389] (c) position X13 is: N, H, S, T, P, K, I, D, or Y; and/or an amino acid modification, e.g., a conservative substitution, of any of the aforesaid amino acids in (a)-(c).
[0390] 160. The AAV capsid variant of embodiment 159, wherein:
   [0391] (a) position X11 is: V, D, F, A, E, L, or G;
   [0392] (b) position X12 is: Q, R, P, K, or L; and/or
   [0393] (c) position X13 is: N, H, S, T, P, K, I, or D.
[0394] 161. The AAV capsid variant of embodiment 159 or 160, wherein:
   [0395] (a) position X11 is V;
   [0396] (b) position X12: Q, R, P, K, or L; and/or
   [0397] (c) position X13 is: N.
[0398] 162. The AAV capsid variant of any one of embodiments 159-161, wherein position X12 is P.
[0399] 163. The AAV capsid variant of any one of embodiments 159-161, wherein position X12 is K.
[0400] 164. The AAV capsid variant of any one of embodiments 159-161, wherein position X12 is E or H.
[0401] 165. The AAV capsid variant of any one of embodiments 159-164, wherein [E] comprises:
   [0402] (i) VQ, DQ, FQ, VR, VP, VK, AQ, EQ, LQ, GQ, VL, VH, VE, DK, GH, IQ, QN, QH, QS, QT, QP, RN, PN, KN, QK, QI, LN, QD, HN, KT, KK, EN, QY, or PH; or
   [0403] (ii) VQ, DQ, FQ, VR, VP, VK, AQ, EQ, LQ, GQ, VL, QN, QH, QS, QT, QP, RN, PN, KN, QK, QI, LN, or QD.
[0404] 166. The AAV capsid variant of any one of embodiments 159-165, wherein [E] is or comprises:
   [0405] (i) VQN, VPN, VKN, DQN, VQH, FQN, VQS, VQT, VQP, VRN, AQN, VQK, EQN, VQI, LQN, GQT, VLN, VQD, VHN, GQN, VKT, VKK, FQK, VEN, VQY, DKN, GHN, IQN, or VPH; or
   [0406] (ii) VQN, VPN, VKN, DQN, VQH, FQN, VQS, VQT, VQP, VRN, AQN, VQK, EQN, VQI, LQN, GQT, VLN, or VQD.
[0407] 167. The AAV capsid variant of any one of embodiments 159-166, wherein [E] is or comprises VQN, VPN, or VKN.
[0408] 168. The AAV capsid variant of any one of embodiments 159-167, wherein [E] is or comprises VEN, VHN, VKN, or VPN.
[0409] 169. The AAV capsid variant of any one of embodiments 159-168, wherein [D][E] is or comprises:

(i)
(SEQ ID NO: 4851)
TGWVQN,
(SEQ ID NO: 5000)
TGWVPN,
(SEQ ID NO: 5047)
TTKVQN,
(SEQ ID NO: 5013)
TMKVQN,
(SEQ ID NO: 5062)
VAQVQN,
(SEQ ID NO: 4978)
TAWDQN,
(SEQ ID NO: 4992)
TGSVQH,
(SEQ ID NO: 5072)
VKQVQN,
(SEQ ID NO: 4854)
SAPVQN,
(SEQ ID NO: 4912)
LSKVQN,
(SEQ ID NO: 4891)
LAPVQN,
(SEQ ID NO: 4893)
LAQVQN,
(SEQ ID NO: 4968)
TAKVQN,
(SEQ ID NO: 4955)
SAKVQN,
(SEQ ID NO: 4982)
TGCFQN,
(SEQ ID NO: 5026)
TQKVQN,
(SEQ ID NO: 5052)
TVAVQN,
(SEQ ID NO: 4914)
LSPVQN,
(SEQ ID NO: 5050)
TTQVQN,
(SEQ ID NO: 4973)
TAQVQN,
(SEQ ID NO: 4934)
RIAVQN,
(SEQ ID NO: 4931)
RASVQN,
(SEQ ID NO: 5048)
TTPVQN,
(SEQ ID NO: 4853)
LTPVQN,
(SEQ ID NO: 4963)
STPVQN,
(SEQ ID NO: 4861)
TSPVQN,
(SEQ ID NO: 5016)
TMQVQN,
(SEQ ID NO: 5036)
TSKVQN,
(SEQ ID NO: 5092)
VSQVQN,
(SEQ ID NO: 4868)
VSPVQN,
(SEQ ID NO: 5055)
TVQVQN,
(SEQ ID NO: 5097)
VTAVQN,
(SEQ ID NO: 4941)
RQPVQN,
(SEQ ID NO: 4884)
ISGVQN,
(SEQ ID NO: 5087)
VRPVQN,
(SEQ ID NO: 4897)
LGPVQN,
(SEQ ID NO: 5022)
TNQVQN,
(SEQ ID NO: 5084)
VQQVQN,
(SEQ ID NO: 5061)
VANVQN,
(SEQ ID NO: 4870)
AAPVQN,
(SEQ ID NO: 4947)
RSTVQN,
(SEQ ID NO: 5011)
TMAVQN,
(SEQ ID NO: 4882)
IQPVQN,
(SEQ ID NO: 4878)
IASVQN,
(SEQ ID NO: 4867)
TVSVQN,
(SEQ ID NO: 4933)
RGSVQN,
(SEQ ID NO: 4925)
NSPVQN,
(SEQ ID NO: 4908)
LQPVQN,
(SEQ ID NO: 5098)
VTGVQN,
(SEQ ID NO: 5076)
VMQVQN,
(SEQ ID NO: 4959)
SMAVQN,
(SEQ ID NO: 5066)
VGKVQN,
(SEQ ID NO: 4883)
IQSVQN,
(SEQ ID NO: 4874)
CSPVQN,
(SEQ ID NO: 4910)
LQRVQN,
(SEQ ID NO: 4979)
TAWVQH,
(SEQ ID NO: 5024)
TPPVQN,
(SEQ ID NO: 5099)
VTKVQN,
(SEQ ID NO: 4855)
SSPVQN,
(SEQ ID NO: 4871)
AGPVQN,
(SEQ ID NO: 4894)
LARVQN,
(SEQ ID NO: 5051)
TTTVQN,
(SEQ ID NO: 4984)
TGGFQN,
(SEQ ID NO: 5010)
TLQVQN,
(SEQ ID NO: 5018)
TMSVQN,
(SEQ ID NO: 5060)
VAKVQN,
(SEQ ID NO: 4929)
RAAVQN,
(SEQ ID NO: 5054)
TVGVQN,
(SEQ ID NO: 4907)
LNPVQN,
(SEQ ID NO: 4915)
LSQVQN,
(SEQ ID NO: 5006)
TKPVQN,
(SEQ ID NO: 5021)
TNAVQN,
(SEQ ID NO: 4896)
LATVQN,
(SEQ ID NO: 5100)
VTPVQN,
(SEQ ID NO: 5081)
VQAVQN,
(SEQ ID NO: 4860)
TTSVQN,
(SEQ ID NO: 4875)
CTPVQN,
(SEQ ID NO: 4967)
TAGVQN,
(SEQ ID NO: 5040)
TSQVQN,
(SEQ ID NO: 5014)
TMNVQN,
(SEQ ID NO: 5043)
TSTVQN,
(SEQ ID NO: 5071)
VKPVQN,
(SEQ ID NO: 4872)
ASPVQN,
(SEQ ID NO: 5058)
VAAVQN,
(SEQ ID NO: 4901)
LKSVQN,
(SEQ ID NO: 4876)
IAAVQN,
(SEQ ID NO: 4966)
TAAVQN,
(SEQ ID NO: 5005)
TKAVQN,
(SEQ ID NO: 4994)
TGSVQS,
(SEQ ID NO: 5090)
VSNVQN,
(SEQ ID NO: 4971)
TAPVQN,
(SEQ ID NO: 4904)
LMPVQN,
(SEQ ID NO: 4900)
LHPVQN,
(SEQ ID NO: 4930)
RAQVQN,
(SEQ ID NO: 4919)
LTNVQN,
(SEQ ID NO: 4952)
RTTVQN,
(SEQ ID NO: 5044)
TSVVQN,
(SEQ ID NO: 4939)
RMSVQN,
(SEQ ID NO: 5067)
VGNVQN,
(SEQ ID NO: 4905)
LMQVQN,
(SEQ ID NO: 4976)
TATVQN,
(SEQ ID NO: 5069)
VHPVQN,
(SEQ ID NO: 5091)
VSPVQT,
(SEQ ID NO: 4886)
ISSVQN,
(SEQ ID NO: 5063)
VASVQN,
(SEQ ID NO: 5032)
TRWDQN,
(SEQ ID NO: 5020)
TMTVQN,
(SEQ ID NO: 4946)
RSSVQN,
(SEQ ID NO: 4863)
TAWVQN,
(SEQ ID NO: 4949)
RTGVQN,
(SEQ ID NO: 5064)
VATVQN,
(SEQ ID NO: 5101)
VTSVQN,
(SEQ ID NO: 4869)
VSSVQN,
(SEQ ID NO: 5023)
TNSVQN,
(SEQ ID NO: 5070)
VKAVQN,
(SEQ ID NO: 4958)
SGPVQN,
(SEQ ID NO: 4989)
TGPVQN,
(SEQ ID NO: 4969)
TAMVQN,
(SEQ ID NO: 5029)
TQPVQN,
(SEQ ID NO: 5030)
TQQVQN,
(SEQ ID NO: 5093)
VSRVQN,
(SEQ ID NO: 5002)
TGWVQP,
(SEQ ID NO: 5088)
VSAVQN,
(SEQ ID NO: 5074)
VLSVQN,
(SEQ ID NO: 5025)
TQHVQN,
(SEQ ID NO: 4895)
LASVQN,
(SEQ ID NO: 4928)
QAPVQN,
(SEQ ID NO: 4922)
NAQVQN,
(SEQ ID NO: 4873)
ATPVQN,
(SEQ ID NO: 5083)
VQPVQN,
(SEQ ID NO: 5045)
TTAVQN,
(SEQ ID NO: 5004)
TGWVRN,
(SEQ ID NO: 4852)
LAAVQN,
(SEQ ID NO: 5039)
TSPDQN,
(SEQ ID NO: 4943)
RSGVQN,
(SEQ ID NO: 4988)
TGGVQT,
(SEQ ID NO: 5049)
TTPVQT,
(SEQ ID NO: 4902)
LMAVQN,
(SEQ ID NO: 5015)
TMPVQN,
(SEQ ID NO: 4890)
LANVQN,
(SEQ ID NO: 5096)
VSTVQN,
(SEQ ID NO: 4957)
SAQVQN,
(SEQ ID NO: 4926)
NTPVQN,
(SEQ ID NO: 5095)
VSSVQT,
(SEQ ID NO: 5056)
TVSVKN,
(SEQ ID NO: 5102)
TGLVQN,
(SEQ ID NO: 4865)
TGSVQN,
(SEQ ID NO: 4983)
TGGAQN,
(SEQ ID NO: 4977)
TAVVQN,
(SEQ ID NO: 4937)
RLGVQN,
(SEQ ID NO: 4950)
RTLVQN,
(SEQ ID NO: 5027)
TQMVQN,
(SEQ ID NO: 4887)
ITPVQN,
(SEQ ID NO: 5057)
TVWVQK,
(SEQ ID NO: 4942)
RSAVQN,
(SEQ ID NO: 4974)
TASVQN,
(SEQ ID NO: 5012)
TMGVQN,
(SEQ ID NO: 4986)
TGGVQH,
(SEQ ID NO: 5085)
VQSVQN,
(SEQ ID NO: 4864)
TGGVQN,
(SEQ ID NO: 4885)
ISPVQN,
(SEQ ID NO: 5103)
TGWVKN,
(SEQ ID NO: 4990)
TGSAQN,
(SEQ ID NO: 4857)
TGWAQN,
(SEQ ID NO: 5019)
TMSVQT,
(SEQ ID NO: 5065)
VGGVQN,
(SEQ ID NO: 4892)
LAPVQT,
(SEQ ID NO: 4862)
TALVQN,
(SEQ ID NO: 4888)
LAGVQN,
(SEQ ID NO: 4948)
RTAVQN,
(SEQ ID NO: 4944)
RSPVQN,
(SEQ ID NO: 4859)
TLAVQN,
(SEQ ID NO: 4889)
LAHVQN,
(SEQ ID NO: 5037)
TSLVQN,
(SEQ ID NO: 4938)
RLSVQN,
(SEQ ID NO: 4903)
LMGVQN,
(SEQ ID NO: 4961)
SMQVQN,
(SEQ ID NO: 5031)
TQTVQN,
(SEQ ID NO: 4997)
TGWEQN,
(SEQ ID NO: 5068)
VGSVQN,
(SEQ ID NO: 5089)
VSGVQN,
(SEQ ID NO: 5075)
VMAVQN,
(SEQ ID NO: 4879)
IGGVQN,
(SEQ ID NO: 4877)
IAGVQN,
(SEQ ID NO: 4856)
TGRVQN,
(SEQ ID NO: 4911)
LSHVQN,
(SEQ ID NO: 5086)
VQTVQN,
(SEQ ID NO: 4866)
TGWDQN,
(SEQ ID NO: 4940)
RNSVQN,
(SEQ ID NO: 5009)
TLPVQN,
(SEQ ID NO: 5007)
TKQVQN,
(SEQ ID NO: 4898)
LGQVQN,
(SEQ ID NO: 4924)
NMQVQN,
(SEQ ID NO: 4927)
NVQVQN,
(SEQ ID NO: 4993)
TGSVQI,
(SEQ ID NO: 4932)
RGGVQN,
(SEQ ID NO: 5077)
VMSVQN,
(SEQ ID NO: 5046)
TTGVQN,
(SEQ ID NO: 4913)
LSPVQK,
(SEQ ID NO: 4916)
LSRVQN,
(SEQ ID NO: 5094)
VSSVQK,
(SEQ ID NO: 4972)
TAPVQT,
(SEQ ID NO: 4921)
MAPVQN,
(SEQ ID NO: 4881)
ILGVQN,
(SEQ ID NO: 4975)
TASVQT,
(SEQ ID NO: 4991)
TGSLQN,
(SEQ ID NO: 4996)
TGTVQN,
(SEQ ID NO: 4995)
TGSVQT,
(SEQ ID NO: 5042)
TSSVQT,
(SEQ ID NO: 5035)
TSHVQN,
(SEQ ID NO: 4935)
RIGVQN,
(SEQ ID NO: 4999)
TGWGQT,
(SEQ ID NO: 4956)
SAMVQN,
(SEQ ID NO: 5038)
TSMVQN,
(SEQ ID NO: 4960)
SMGVQN,
(SEQ ID NO: 4962)
SMSVQN,
(SEQ ID NO: 5041)
TSSVQN,
(SEQ ID NO: 5034)
TSGVQN,
(SEQ ID NO: 4981)
TGAVQN,
(SEQ ID NO: 5080)
VNSVQN,
(SEQ ID NO: 5059)
VAGVQN,
(SEQ ID NO: 4880)
IGSVQN,
(SEQ ID NO: 4899)
LGSVQN,
(SEQ ID NO: 5079)
VNGVQN,
(SEQ ID NO: 4918)
LTAVQN,
(SEQ ID NO: 5082)
VQNVQN,
(SEQ ID NO: 5008)
TKSVQN,
(SEQ ID NO: 4965)
SVGVQN,
(SEQ ID NO: 4980)
TAWVQT,
(SEQ ID NO: 4923)
NASVQN,
(SEQ ID NO: 5033)
TSAVQN,
(SEQ ID NO: 5017)
TMSVKN,
(SEQ ID NO: 4970)
TANVQN,
(SEQ ID NO: 4998)
TGWFQN,
(SEQ ID NO: 4985)
TGGVLN,
(SEQ ID NO: 4920)
LTSVQN,
(SEQ ID NO: 5003)
TGWVQT,
(SEQ ID NO: 4945)
RSQVQN,
(SEQ ID NO: 4936)
RIPVQN,
(SEQ ID NO: 5001)
TGWVQD,
(SEQ ID NO: 4953)
RVEVQN,
(SEQ ID NO: 5073)
VLPVQN,
(SEQ ID NO: 4987)
TGGVQK,
(SEQ ID NO: 4964)
SVAVQN,
(SEQ ID NO: 4909)
LQQVQN,
(SEQ ID NO: 4917)
LSTVQN,
(SEQ ID NO: 4954)
SAAVQN,
(SEQ ID NO: 4951)
RTSVQN,
(SEQ ID NO: 5028)
TQNVQN,
(SEQ ID NO: 5078)
VNAVQN,
(SEQ ID NO: 5053)
TVAVQT,
(SEQ ID NO: 4906)
LMSVQN,
(SEQ ID NO: 5105)
TGWVQH,
(SEQ ID NO: 4858)
TGWVQS,
(SEQ ID NO: 5205)
TMMVQN,
(SEQ ID NO: 5206)
TGGVQS,
(SEQ ID NO: 5207)
TGSFQN,
(SEQ ID NO: 5208)
RSVVQN,
(SEQ ID NO: 5209)
TGSVQK,
(SEQ ID NO: 5210)
TQLVQN,
(SEQ ID NO: 5211)
TGGVHN,
(SEQ ID NO: 5212)
RTPVQN,
(SEQ ID NO: 5213)
RQQVQN,
(SEQ ID NO: 5214)
TGSVRN,
(SEQ ID NO: 5215)
VQGVQN,
(SEQ ID NO: 5216)
PGWVQT,
(SEQ ID NO: 5217)
STQVQN,
(SEQ ID NO: 5218)
QSPVQN,
(SEQ ID NO: 5219)
RYSVQN,
(SEQ ID NO: 5220)
TQRVQN,
(SEQ ID NO: 5221)
SAGVQN,
(SEQ ID NO: 5222)
SAPVQT,
(SEQ ID NO: 5223)
RQSVQN,
(SEQ ID NO: 5224)
SQPVQN,
(SEQ ID NO: 5225)
VASVKN,
(SEQ ID NO: 5226)
TAWVRN,
(SEQ ID NO: 5227)
TGGGQN,
(SEQ ID NO: 5228)
STSVQN,
(SEQ ID NO: 5229)
VLGVQN,
(SEQ ID NO: 5230)
NQPVQN,
(SEQ ID NO: 5231)
LGTVQN,
(SEQ ID NO: 5232)
RAGVQN,
(SEQ ID NO: 5233)
TGGVKN,
(SEQ ID NO: 5234)
TAWLQN,
(SEQ ID NO: 5235)
TRWVQK,
(SEQ ID NO: 5236)
LAPVKN,
(SEQ ID NO: 5237)
TGSVQD,
(SEQ ID NO: 5238)
TGMVQN,
(SEQ ID NO: 5239)
LSNVQN,
(SEQ ID NO: 5240)
RLPVQN,
(SEQ ID NO: 5241)
RQGVQN,
(SEQ ID NO: 5242)
STPVQT,
(SEQ ID NO: 5243)
TTPVKN,
(SEQ ID NO: 5244)
RLTVQN,
(SEQ ID NO: 5245)
TLRVQN,
(SEQ ID NO: 5246)
SAFVQN,
(SEQ ID NO: 5247)
SVQVQN,
(SEQ ID NO: 5248)
LLPVQN,
(SEQ ID NO: 5249)
RTQVQN,
(SEQ ID NO: 5250)
TGSDQN,
(SEQ ID NO: 5251)
VASDQN,
(SEQ ID NO: 5252)
VSPVKN,
(SEQ ID NO: 5253)
LPPVQN,
(SEQ ID NO: 5254)
SSPVQT,
(SEQ ID NO: 5255)
AQPVQN,
(SEQ ID NO: 5256)
TPQVQN,
(SEQ ID NO: 5257)
TSWVQN,
(SEQ ID NO: 5258)
TGGDQN,
(SEQ ID NO: 5109)
LSPVKN,
(SEQ ID NO: 5259)
SSPVKN,
(SEQ ID NO: 5260)
NTTVQN,
(SEQ ID NO: 5261)
TTRVQN,
(SEQ ID NO: 5262)
TQWVQN,
(SEQ ID NO: 5263)
TGSVHN,
(SEQ ID NO: 5264)
TGGLQN,
(SEQ ID NO: 5265)
TAWVQK,
(SEQ ID NO: 5266)
TGRVQT,
(SEQ ID NO: 5267)
NTQVQN,
(SEQ ID NO: 5268)
TGWLQN,
(SEQ ID NO: 5269)
TYAVQN,
(SEQ ID NO: 5270)
TLSVQN,
(SEQ ID NO: 5271)
NLPVQN,
(SEQ ID NO: 5272)
TSSDQN,
(SEQ ID NO: 5273)
ATSVQN,
(SEQ ID NO: 5274)
TAWFQN,
(SEQ ID NO: 5275)
ATQVQN,
(SEQ ID NO: 5276)
VSSVKN,
(SEQ ID NO: 5107)
LSSVQN,
(SEQ ID NO: 5277)
TGSGQN,
(SEQ ID NO: 5278)
LQPVQT,
(SEQ ID NO: 5279)
VSAVKN,
(SEQ ID NO: 5280)
TQAVQN,
(SEQ ID NO: 5281)
TGWVQK,
(SEQ ID NO: 5282)
VMPVQN,
(SEQ ID NO: 5283)
TVSVQK,
(SEQ ID NO: 5284)
TAWAQN,
(SEQ ID NO: 5285)
NALVQN,
(SEQ ID NO: 5286)
RMLVQN,
(SEQ ID NO: 5287)
TVAVKN,
(SEQ ID NO: 5288)
RQLVQN,
(SEQ ID NO: 5289)
TLGVQN,
(SEQ ID NO: 5290)
LGPVQT,
(SEQ ID NO: 5291)
TGSVKN,
(SEQ ID NO: 5292)
TMSDQN,
(SEQ ID NO: 5293)
LASVKN,
(SEQ ID NO: 5294)
TGFVQN,
(SEQ ID NO: 5295)
SALVQN,
(SEQ ID NO: 5296)
TGWVKT,
(SEQ ID NO: 5297)
SQLVQN,
(SEQ ID NO: 5298)
TGWGQN,
(SEQ ID NO: 5299)
LSAVQN,
(SEQ ID NO: 5300)
TMQVQT,
(SEQ ID NO: 5301)
TGQVQN,
(SEQ ID NO: 5302)
TSPVKN,
(SEQ ID NO: 5303)
LSQVQT,
(SEQ ID NO: 5304)
TGSVLN,
(SEQ ID NO: 5305)
TNGVQN,
(SEQ ID NO: 5306)
TGWVKK,
(SEQ ID NO: 5307)
AAAVQN,
(SEQ ID NO: 5308)
SAVVQN,
(SEQ ID NO: 5309)
PGWVQH,
(SEQ ID NO: 5310)
TASDQN,
(SEQ ID NO: 5106)
LSGVQN,
(SEQ ID NO: 5311)
SSRVQN,
(SEQ ID NO: 5312)
SPPVQN,
(SEQ ID NO: 5313)
VQPVQT,
(SEQ ID NO: 5314)
TSSVKN,
(SEQ ID NO: 5315)
LSPLQN,
(SEQ ID NO: 5316)
VSQVQK,
(SEQ ID NO: 5317)
LVGVQN,
(SEQ ID NO: 5318)
TLSVKN,
(SEQ ID NO: 5319)
TGWFQK,
(SEQ ID NO: 5320)
TPAVQN,
(SEQ ID NO: 5321)
TVGVKN,
(SEQ ID NO: 5322)
KGWDQN,
(SEQ ID NO: 5323)
TAWVLN,
(SEQ ID NO: 5324)
VPPVQN,
(SEQ ID NO: 5325)
ATGVQN,
(SEQ ID NO: 5326)
TGGVQI,
(SEQ ID NO: 5327)
TGWVLN,
(SEQ ID NO: 5328)
TAWGQN,
(SEQ ID NO: 5329)
TGWVHN,
(SEQ ID NO: 5330)
LGSVQT,
(SEQ ID NO: 5331)
SANVQN,
(SEQ ID NO: 5332)
TGGVQD,
(SEQ ID NO: 5333)
TMAVKN,
(SEQ ID NO: 5334)
TASVKN,
(SEQ ID NO: 5335)
SSPVQK,
(SEQ ID NO: 5336)
TGTVQT,
(SEQ ID NO: 5337)
TGWVQI,
(SEQ ID NO: 5338)
TVWVKN,
(SEQ ID NO: 5339)
SQQVQN,
(SEQ ID NO: 5340)
VGSVQT,
(SEQ ID NO: 5341)
SSMVQN,
(SEQ ID NO: 5342)
TSPVQK,
(SEQ ID NO: 5343)
AVGVQN,
(SEQ ID NO: 5344)
VAPVQN,
(SEQ ID NO: 5345)
TLPVQK,
(SEQ ID NO: 5346)
TGRVQH,
(SEQ ID NO: 5347)
TPSVQN,
(SEQ ID NO: 5348)
TGWVEN,
(SEQ ID NO: 5349)
RGWVQN,
(SEQ ID NO: 5350)
TGSVEN,
(SEQ ID NO: 5351)
SSLVQN,
(SEQ ID NO: 5352)
TAWVKN,
(SEQ ID NO: 5353)
TYSVQN,
(SEQ ID NO: 5354)
LAAVQT,
(SEQ ID NO: 5355)
TALVKN,
(SEQ ID NO: 5356)
TGWVQY,
(SEQ ID NO: 5357)
TLPVQT,
(SEQ ID NO: 5358)
TGLVQH,
(SEQ ID NO: 5359)
TPTVQN,
(SEQ ID NO: 5360)
TASVQK,
(SEQ ID NO: 5361)
TSPVQI,
(SEQ ID NO: 5362)
IGWVQN,
(SEQ ID NO: 5363)
TGWDKN,
(SEQ ID NO: 5364)
KSSVQN,
(SEQ ID NO: 5365)
TGYVQN,
(SEQ ID NO: 5366)
RGWVQT,
(SEQ ID NO: 5367)
RSLVQN,
(SEQ ID NO: 5368)
TGGVEN,
(SEQ ID NO: 5369)
TGCVRN,
(SEQ ID NO: 5370)
LSPVQS,
(SEQ ID NO: 5371)
TGPVQT,
(SEQ ID NO: 5372)
TVGVQK,
(SEQ ID NO: 5373)
TASGQN,
(SEQ ID NO: 5374)
SVSVQN,
(SEQ ID NO: 5375)
SGPVQT,
(SEQ ID NO: 5376)
VMSVKN,
(SEQ ID NO: 5377)
LGSVQK,
(SEQ ID NO: 5378)
TGLVLN,
(SEQ ID NO: 5379)
TSNVQN,
(SEQ ID NO: 5380)
TGWGHN,
(SEQ ID NO: 5381)
SQMVQN,
(SEQ ID NO: 5382)
TVSVHN,
(SEQ ID NO: 5383)
LSSVQT,
(SEQ ID NO: 5384)
TASVRN,
(SEQ ID NO: 5385)
VPAVQN,
(SEQ ID NO: 5386)
TGRVQK,
(SEQ ID NO: 5387)
AMSVQN,
(SEQ ID NO: 5388)
TAWVHN,
(SEQ ID NO: 5389)
TGLVRN,
(SEQ ID NO: 5390)
RTLVQT,
(SEQ ID NO: 5391)
TGSIQN,
(SEQ ID NO: 5392)
LSSVKN,
(SEQ ID NO: 5393)
TLQVQK,
(SEQ ID NO: 5394)
VGSVKN,
(SEQ ID NO: 5395)
LAPLQN,
(SEQ ID NO: 5396)
TPGVQN,
(SEQ ID NO: 5397)
LSAVQT,
(SEQ ID NO: 5398)
TGVVQN,
(SEQ ID NO: 5399)
VPQVQN,
(SEQ ID NO: 5400)
TGCVQK,
(SEQ ID NO: 5401)
TRWVQT,
(SEQ ID NO: 5402)
TGLDQN,
(SEQ ID NO: 5403)
VSSVHN,
(SEQ ID NO: 5404)
KGWVQT,
(SEQ ID NO: 5405)
SLPVQN,
(SEQ ID NO: 5406)
TTSVHN,
(SEQ ID NO: 5407)
TVWVQN,
(SEQ ID NO: 5408)
TAQLQN,
(SEQ ID NO: 5409)
TRWVKN,
(SEQ ID NO: 5410)
TAWIQN,
(SEQ ID NO: 5411)
LSQVKN,
(SEQ ID NO: 5412)
TSTVKN,
(SEQ ID NO: 5413)
ALPVQN,
(SEQ ID NO: 5414)
TSMVQT,
(SEQ ID NO: 5415)
TSSVQH,
(SEQ ID NO: 5416)
TAMVKN,
(SEQ ID NO: 5417)
TPWVQN,
(SEQ ID NO: 5418)
TPRVQN,
(SEQ ID NO: 5419)
SSSVQN,
(SEQ ID NO: 5420)
RPPVQN,
(SEQ ID NO: 5421)
LAGVKN,
(SEQ ID NO: 5422)
TSPAQN,
(SEQ ID NO: 5423)
RSPVQT,
(SEQ ID NO: 5424)
TGWVPH,
(SEQ ID NO: 5425)
PGWGQN,
(SEQ ID NO: 5426)
IPPVQN,
(SEQ ID NO: 5427)
TGRVKN,
(SEQ ID NO: 5428)
TGRLQN,
(SEQ ID NO: 5429)
LSSVQH,
(SEQ ID NO: 5430)
AGWVQT,
(SEQ ID NO: 5431)
TGLVQS,
(SEQ ID NO: 5432)
TGCVQI,
(SEQ ID NO: 5433)
RPGVQN,
(SEQ ID NO: 5434)
TAAVQH,
(SEQ ID NO: 5435)
TGCDQN,
(SEQ ID NO: 5436)
TGRVRN,
or
(SEQ ID NO: 5437)
TGRDQN;
(ii)
(SEQ ID NO: 4851)
TGWVQN,
(SEQ ID NO: 5000)
TGWVPN,
(SEQ ID NO: 5047)
TTKVQN,
(SEQ ID NO: 5013)
TMKVQN,
(SEQ ID NO: 5062)
VAQVQN,
(SEQ ID NO: 4978)
TAWDQN,
(SEQ ID NO: 4992)
TGSVQH,
(SEQ ID NO: 5072)
VKQVQN,
(SEQ ID NO: 4854)
SAPVQN,
(SEQ ID NO: 4912)
LSKVQN,
(SEQ ID NO: 4891)
LAPVQN,
(SEQ ID NO: 4893)
LAQVQN,
(SEQ ID NO: 4968)
TAKVQN,
(SEQ ID NO: 4955)
SAKVQN,
(SEQ ID NO: 4982)
TGCFQN,
(SEQ ID NO: 5026)
TQKVQN,
(SEQ ID NO: 5052)
TVAVQN,
(SEQ ID NO: 4914)
LSPVQN,
(SEQ ID NO: 5050)
TTQVQN,
(SEQ ID NO: 4973)
TAQVQN,
(SEQ ID NO: 4934)
RIAVQN,
(SEQ ID NO: 4931)
RASVQN,
(SEQ ID NO: 5048)
TTPVQN,
(SEQ ID NO: 4853)
LTPVQN,
(SEQ ID NO: 4963)
STPVQN,
(SEQ ID NO: 4861)
TSPVQN,
(SEQ ID NO: 5016)
TMQVQN,
(SEQ ID NO: 5036)
TSKVQN,
(SEQ ID NO: 5092)
VSQVQN,
(SEQ ID NO: 4868)
VSPVQN,
(SEQ ID NO: 5055)
TVQVQN,
(SEQ ID NO: 5097)
VTAVQN,
(SEQ ID NO: 4941)
RQPVQN,
(SEQ ID NO: 4884)
ISGVQN,
(SEQ ID NO: 5087)
VRPVQN,
(SEQ ID NO: 4897)
LGPVQN,
(SEQ ID NO: 5022)
TNQVQN,
(SEQ ID NO: 5084)
VQQVQN,
(SEQ ID NO: 5061)
VANVQN,
(SEQ ID NO: 4870)
AAPVQN,
(SEQ ID NO: 4947)
RSTVQN,
(SEQ ID NO: 5011)
TMAVQN,
(SEQ ID NO: 4882)
IQPVQN,
(SEQ ID NO: 4878)
IASVQN,
(SEQ ID NO: 4867)
TVSVQN,
(SEQ ID NO: 4933)
RGSVQN,
(SEQ ID NO: 4925)
NSPVQN,
(SEQ ID NO: 4908)
LQPVQN,
(SEQ ID NO: 5098)
VTGVQN,
(SEQ ID NO: 5076)
VMQVQN,
(SEQ ID NO: 4959)
SMAVQN,
(SEQ ID NO: 5066)
VGKVQN,
(SEQ ID NO: 4883)
IQSVQN,
(SEQ ID NO: 4874)
CSPVQN,
(SEQ ID NO: 4910)
LQRVQN,
(SEQ ID NO: 4979)
TAWVQH,
(SEQ ID NO: 5024)
TPPVQN,
(SEQ ID NO: 5099)
VTKVQN,
(SEQ ID NO: 4855)
SSPVQN,
(SEQ ID NO: 4871)
AGPVQN,
(SEQ ID NO: 4894)
LARVQN,
(SEQ ID NO: 5051)
TTTVQN,
(SEQ ID NO: 4984)
TGGFQN,
(SEQ ID NO: 5010)
TLQVQN,
(SEQ ID NO: 5018)
TMSVQN,
(SEQ ID NO: 5060)
VAKVQN,
(SEQ ID NO: 4929)
RAAVQN,
(SEQ ID NO: 5054)
TVGVQN,
(SEQ ID NO: 4907)
LNPVQN,
(SEQ ID NO: 4915)
LSQVQN,
(SEQ ID NO: 5006)
TKPVQN,
(SEQ ID NO: 5021)
TNAVQN,
(SEQ ID NO: 4896)
LATVQN,
(SEQ ID NO: 5100)
VTPVQN,
(SEQ ID NO: 5081)
VQAVQN,
(SEQ ID NO: 4860)
TTSVQN,
(SEQ ID NO: 4875)
CTPVQN,
(SEQ ID NO: 4967)
TAGVQN,
(SEQ ID NO: 5040)
TSQVQN,
(SEQ ID NO: 5014)
TMNVQN,
(SEQ ID NO: 5043)
TSTVQN,
(SEQ ID NO: 5071)
VKPVQN,
(SEQ ID NO: 4872)
ASPVQN,
(SEQ ID NO: 5058)
VAAVQN,
(SEQ ID NO: 4901)
LKSVQN,
(SEQ ID NO: 4876)
IAAVQN,
(SEQ ID NO: 4966)
TAAVQN,
(SEQ ID NO: 5005)
TKAVQN,
(SEQ ID NO: 4994)
TGSVQS,
(SEQ ID NO: 5090)
VSNVQN,
(SEQ ID NO: 4971)
TAPVQN,
(SEQ ID NO: 4904)
LMPVQN,
(SEQ ID NO: 4900)
LHPVQN,
(SEQ ID NO: 4930)
RAQVQN,
(SEQ ID NO: 4919)
LTNVQN,
(SEQ ID NO: 4952)
RTTVQN,
(SEQ ID NO: 5044)
TSVVQN,
(SEQ ID NO: 4939)
RMSVQN,
(SEQ ID NO: 5067)
VGNVQN,
(SEQ ID NO: 4905)
LMQVQN,
(SEQ ID NO: 4976)
TATVQN,
(SEQ ID NO: 5069)
VHPVQN,
(SEQ ID NO: 5091)
VSPVQT,
(SEQ ID NO: 4886)
ISSVQN,
(SEQ ID NO: 5063)
VASVQN,
(SEQ ID NO: 5032)
TRWDQN,
(SEQ ID NO: 5020)
TMTVQN,
(SEQ ID NO: 4946)
RSSVQN,
(SEQ ID NO: 4863)
TAWVQN,
(SEQ ID NO: 4949)
RTGVQN,
(SEQ ID NO: 5064)
VATVQN,
(SEQ ID NO: 5101)
VTSVQN,
(SEQ ID NO: 4869)
VSSVQN,
(SEQ ID NO: 5023)
TNSVQN,
(SEQ ID NO: 5070)
VKAVQN,
(SEQ ID NO: 4958)
SGPVQN,
(SEQ ID NO: 4989)
TGPVQN,
(SEQ ID NO: 4969)
TAMVQN,
(SEQ ID NO: 5029)
TQPVQN,
(SEQ ID NO: 5030)
TQQVQN,
(SEQ ID NO: 5093)
VSRVQN,
(SEQ ID NO: 5002)
TGWVQP,
(SEQ ID NO: 5088)
VSAVQN,
(SEQ ID NO: 5074)
VLSVQN,
(SEQ ID NO: 5025)
TQHVQN,
(SEQ ID NO: 4895)
LASVQN,
(SEQ ID NO: 4928)
QAPVQN,
(SEQ ID NO: 4922)
NAQVQN,
(SEQ ID NO: 4873)
ATPVQN,
(SEQ ID NO: 5083)
VQPVQN,
(SEQ ID NO: 5045)
TTAVQN,
(SEQ ID NO: 5004)
TGWVRN,
(SEQ ID NO: 4852)
LAAVQN,
(SEQ ID NO: 5039)
TSPDQN,
(SEQ ID NO: 4943)
RSGVQN,
(SEQ ID NO: 4988)
TGGVQT,
(SEQ ID NO: 5049)
TTPVQT,
(SEQ ID NO: 4902)
LMAVQN,
(SEQ ID NO: 5015)
TMPVQN,
(SEQ ID NO: 4890)
LANVQN,
(SEQ ID NO: 5096)
VSTVQN,
(SEQ ID NO: 4957)
SAQVQN,
(SEQ ID NO: 4926)
NTPVQN,
(SEQ ID NO: 5095)
VSSVQT,
(SEQ ID NO: 5056)
TVSVKN,
(SEQ ID NO: 5102)
TGLVQN,
(SEQ ID NO: 4865)
TGSVQN,
(SEQ ID NO: 4983)
TGGAQN,
(SEQ ID NO: 4977)
TAVVQN,
(SEQ ID NO: 4937)
RLGVQN,
(SEQ ID NO: 4950)
RTLVQN,
(SEQ ID NO: 5027)
TQMVQN,
(SEQ ID NO: 4887)
ITPVQN,
(SEQ ID NO: 5057)
TVWVQK,
(SEQ ID NO: 4942)
RSAVQN,
(SEQ ID NO: 4974)
TASVQN,
(SEQ ID NO: 5012)
TMGVQN,
(SEQ ID NO: 4986)
TGGVQH,
(SEQ ID NO: 5085)
VQSVQN,
(SEQ ID NO: 4864)
TGGVQN,
(SEQ ID NO: 4885)
ISPVQN,
(SEQ ID NO: 5103)
TGWVKN,
(SEQ ID NO: 4990)
TGSAQN,
(SEQ ID NO: 4857)
TGWAQN,
(SEQ ID NO: 5019)
TMSVQT,
(SEQ ID NO: 5065)
VGGVQN,
(SEQ ID NO: 4892)
LAPVQT,
(SEQ ID NO: 4862)
TALVQN,
(SEQ ID NO: 4888)
LAGVQN,
(SEQ ID NO: 4948)
RTAVQN,
(SEQ ID NO: 4944)
RSPVQN,
(SEQ ID NO: 4859)
TLAVQN,
(SEQ ID NO: 4889)
LAHVQN,
(SEQ ID NO: 5037)
TSLVQN,
(SEQ ID NO: 4938)
RLSVQN,
(SEQ ID NO: 4903)
LMGVQN,
(SEQ ID NO: 4961)
SMQVQN,
(SEQ ID NO: 5031)
TQTVQN,
(SEQ ID NO: 4997)
TGWEQN,
(SEQ ID NO: 5068)
VGSVQN,
(SEQ ID NO: 5089)
VSGVQN,
(SEQ ID NO: 5075)
VMAVQN,
(SEQ ID NO: 4879)
IGGVQN,
(SEQ ID NO: 4877)
IAGVQN,
(SEQ ID NO: 4856)
TGRVQN,
(SEQ ID NO: 4911)
LSHVQN,
(SEQ ID NO: 5086)
VQTVQN,
(SEQ ID NO: 4866)
TGWDQN,
(SEQ ID NO: 4940)
RNSVQN,
(SEQ ID NO: 5009)
TLPVQN,
(SEQ ID NO: 5007)
TKQVQN,
(SEQ ID NO: 4898)
LGQVQN,
(SEQ ID NO: 4924)
NMQVQN,
(SEQ ID NO: 4927)
NVQVQN,
(SEQ ID NO: 4993)
TGSVQI,
(SEQ ID NO: 4932)
RGGVQN,
(SEQ ID NO: 5077)
VMSVQN,
(SEQ ID NO: 5046)
TTGVQN,
(SEQ ID NO: 4913)
LSPVQK,
(SEQ ID NO: 4916)
LSRVQN,
(SEQ ID NO: 5094)
VSSVQK,
(SEQ ID NO: 4972)
TAPVQT,
(SEQ ID NO: 4921)
MAPVQN,
(SEQ ID NO: 4881)
ILGVQN,
(SEQ ID NO: 4975)
TASVQT,
(SEQ ID NO: 4991)
TGSLQN,
(SEQ ID NO: 4996)
TGTVQN,
(SEQ ID NO: 4995)
TGSVQT,
(SEQ ID NO: 5042)
TSSVQT,
(SEQ ID NO: 5035)
TSHVQN,
(SEQ ID NO: 4935)
RIGVQN,
(SEQ ID NO: 4999)
TGWGQT,
(SEQ ID NO: 4956)
SAMVQN,
(SEQ ID NO: 5038)
TSMVQN,
(SEQ ID NO: 4960)
SMGVQN,
(SEQ ID NO: 4962)
SMSVQN,
(SEQ ID NO: 5041)
TSSVQN,
(SEQ ID NO: 5034)
TSGVQN,
(SEQ ID NO: 4981)
TGAVQN,
(SEQ ID NO: 5080)
VNSVQN,
(SEQ ID NO: 5059)
VAGVQN,
(SEQ ID NO: 4880)
IGSVQN,
(SEQ ID NO: 4899)
LGSVQN,
(SEQ ID NO: 5079)
VNGVQN,
(SEQ ID NO: 4918)
LTAVQN,
(SEQ ID NO: 5082)
VQNVQN,
(SEQ ID NO: 5008)
TKSVQN,
(SEQ ID NO: 4965)
SVGVQN,
(SEQ ID NO: 4980)
TAWVQT,
(SEQ ID NO: 4923)
NASVQN,
(SEQ ID NO: 5033)
TSAVQN,
(SEQ ID NO: 5017)
TMSVKN,
(SEQ ID NO: 4970)
TANVQN,
(SEQ ID NO: 4998)
TGWFQN,
(SEQ ID NO: 4985)
TGGVLN,
(SEQ ID NO: 4920)
LTSVQN,
(SEQ ID NO: 5003)
TGWVQT,
(SEQ ID NO: 4945)
RSQVQN,
(SEQ ID NO: 4936)
RIPVQN,
(SEQ ID NO: 5001)
TGWVQD,
(SEQ ID NO: 4953)
RVEVQN,
(SEQ ID NO: 5073)
VLPVQN,
(SEQ ID NO: 4987)
TGGVQK,
(SEQ ID NO: 4964)
SVAVQN,
(SEQ ID NO: 4909)
LQQVQN,
(SEQ ID NO: 4917)
LSTVQN,
(SEQ ID NO: 4954)
SAAVQN,
(SEQ ID NO: 4951)
RTSVQN,
(SEQ ID NO: 5028)
TQNVQN,
(SEQ ID NO: 5078)
VNAVQN,
(SEQ ID NO: 5053)
TVAVQT,
or
(SEQ ID NO: 4906)
LMSVQN;

[0410] (iii) an amino acid sequence comprising any portion of an amino acid sequence in (i) or (ii), e.g., any 2, 3, 4, or 5 amino acids, e.g., consecutive amino acids, thereof;
[0411] (iv) an amino acid sequence comprising at least one, two, or three but no more than four modifications, e.g., substitutions (e.g., conservative substitutions), insertions, or deletions, relative to any of the amino acid sequences in (i) or (ii); or
[0412] (v) an amino acid sequence comprising at least one, two, or three but no more than four different amino acids, relative to any one of the amino acid sequences in (i) or (ii).
[0413] 170. The AAV capsid variant of any one of embodiments 159-169, wherein [D][E] is or comprises TGWVQN (SEQ ID NO: 4851), TGWVPN (SEQ ID NO: 5000), or LSPVKN (SEQ ID NO: 5109).
[0414] 171. The AAV capsid variant of any one of embodiments 159-170, wherein:
   [0415] (i) [B] is or comprises: VHLY (SEQ ID NO: 4680), VHHY (SEQ ID NO: 4683), VHIY (SEQ ID NO: 4681), VNLY (SEQ ID NO: 4724), VQLY (SEQ ID NO: 4729), IHLY (SEQ ID NO: 4730), LHLY (SEQ ID NO: 4727), VPLY (SEQ ID NO: 4723), VDLY (SEQ ID NO: 4731), AHLY (SEQ ID NO: 4732), VHRY (SEQ ID NO: 4725), FHLY (SEQ ID NO: 4726), DHLY (SEQ ID NO: 4728), VLLY (SEQ ID NO: 4733), GHLY (SEQ ID NO: 4734), VRLY (SEQ ID NO: 4735), VHVY (SEQ ID NO: 4682), or VYLY (SEQ ID NO: 4736);
   [0416] (ii) [C] is or comprises: AQAQ (SEQ ID NO: 4737), AQPQ (SEQ ID NO: 4739), AKAQ (SEQ ID NO: 4741), DQAQ (SEQ ID NO: 4744), SQAQ (SEQ ID NO: 4738), AHAQ (SEQ ID NO: 4742), AQEQ (SEQ ID NO: 4748), AQAK (SEQ ID NO: 4746), ALAQ (SEQ ID NO: 4749), APAQ (SEQ ID NO: 4745), ARAQ (SEQ ID NO: 4750), AQAH (SEQ ID NO: 4747), AQAP (SEQ ID NO: 4743), or TQAQ (SEQ ID NO: 4751);
   [0417] (iii) [D] is or comprises: TGW, LSP, TTK, TMK, VAQ, TAW, TGS, VKQ, SAP, LSK, LAP, LAQ, TAK, SAK, TGC, TQK, TVA, TTQ, TAQ, RIA, RAS, TTP, LTP, STP, TSP, TMQ, TSK, VSQ, VSP, TVQ, VTA, RQP, ISG, VRP, LGP, TNQ, VQQ, VAN, AAP, RST, TMA, IQP, IAS, TVS, RGS, NSP, LQP, VTG, VMQ, SMA, VGK, IQS, CSP, LQR, TPP, VTK, SSP, AGP, LAR, TTT, TGG, TLQ, TMS, VAK, RAA, TVG, LNP, LSQ, TKP, TNA, LAT, VTP, VQA, TTS, CTP, TAG, TSQ, TMN, TST, VKP, ASP, VAA, LKS, IAA, TAA, TKA, VSN, TAP, LMP, LHP, RAQ, LTN, RTT, TSV, RMS, VGN, LMQ, TAT, VHP, ISS, VAS, TRW, TMT, RSS, RTG, VAT, VTS, VSS, TNS, VKA, SGP, TGP, TAM, TQP, TQQ, VSR, VSA, VLS, TQH, LAS, QAP, NAQ, ATP, VQP, TTA, LAA, RSG, LMA, TMP, LAN, VST, SAQ, NTP, TGL, TAV, RLG, RTL, TQM, ITP, TVW, RSA, TAS, TMG, VQS, ISP, VGG, TAL, LAG, RTA, RSP, TLA, LAH, TSL, RLS, LMG, SMQ, TQT, VGS, VSG, VMA, IGG, IAG, TGR, LSH, VQT, RNS, TLP, TKQ, LGQ, NMQ, NVQ, RGG, VMS, TTG, LSR, MAP, ILG, TGT, TSS, TSH, RIG, SAM, TSM, SMG, SMS, TSG, TGA, VNS, VAG, IGS, LGS, VNG, LTA, VQN, TKS, SVG, NAS, TSA, TAN, LTS, RSQ, RIP, RVE, VLP, SVA, LQQ, LST, SAA, RTS, TQN, VNA, LMS, TMM, RSV, TQL, RTP, RQQ, VQG, PGW, STQ, QSP, RYS, TQR, SAG, RQS, SQP, STS, VLG, NQP, LGT, RAG, TGM, LSN, RLP, RQG, RLT, TLR, SAF, SVQ, LLP, RTQ, LPP, AQP, TPQ, TSW, NTT, TTR, TQW, NTQ, TYA, TLS, NLP, ATS, ATQ, LSS, TQA, VMP, NAL, RML, RQL, TLG, TGF, SAL, SQL, LSA, TGQ, TNG, AAA, SAV, LSG, SSR, SPP, LVG, TPA, KGW, VPP, ATG, SAN, SQQ, SSM, AVG, VAP, TPS, RGW, SSL, TYS, TPT, IGW, KSS, TGY, RSL, SVS, TSN, SQM, VPA, AMS, TPG, TGV, VPQ, SLP, ALP, TPW, TPR, SSS, RPP, IPP, AGW, or RPG; and/or
   [0418] (iv) [E] is or comprises: VQN, VPN, VKN, DQN, VQH, FQN, VQS, VQT, VQP, VRN, AQN, VQK, EQN, VQI, LQN, GQT, VLN, VQD, VHN, GQN, VKT, VKK, FQK, VEN, VQY, DKN, GHN, IQN, or VPH.
[0419] 172. The AAV capsid variant of any one of embodiments 159-171, wherein:
   [0420] (i) [B] is or comprises: VHLY (SEQ ID NO: 4680), VHHY (SEQ ID NO: 4683), or VHIY (SEQ ID NO: 4681);
   [0421] (ii) [C] is or comprises: AQAQ (SEQ ID NO: 4737), AQPQ (SEQ ID NO: 4739), AKAQ (SEQ ID NO: 4741), DQAQ (SEQ ID NO: 4744), or SQAQ (SEQ ID NO: 4738);
   [0422] (iii) [D] is or comprises: TGW, LSP, TTK, TMK, VAQ, TAW, TGS, VKQ, SAP, LSK, LAP, LAQ, TAK, SAK, TGC, TQK, TVA, TTQ, TAQ, RIA, RAS, TTP, LTP, STP, TSP, TMQ, TSK, VSQ, VSP, TVQ, VTA, RQP, ISG, VRP, LGP, TNQ, VQQ, VAN, AAP, RST, TMA, IQP, IAS, TVS, RGS, NSP, LQP, VTG, VMQ, SMA, VGK, IQS, CSP, LQR, TPP, VTK, SSP, AGP, LAR, TTT, TGG, TLQ, TMS, VAK, RAA, TVG, LNP, LSQ, TKP, TNA, LAT, VTP, VQA, TTS, CTP, TAG, TSQ, TMN, TST, VKP, ASP, VAA, LKS, IAA, TAA, TKA, VSN, TAP, LMP, LHP, RAQ, LTN, RTT, TSV, RMS, VGN, LMQ, TAT, VHP, ISS, VAS, TRW, TMT, RSS, RTG, VAT, VTS, VSS, TNS, VKA, SGP, TGP, TAM, TQP, TQQ, VSR, VSA, VLS, TQH, LAS, QAP, NAQ, ATP, VQP, TTA, LAA, RSG, LMA, TMP, LAN, VST, SAQ, NTP, TGL, TAV, RLG, RTL, TQM, ITP, TVW, RSA, TAS, TMG, VQS, ISP, VGG, TAL, LAG, RTA, RSP, TLA, LAH, TSL, RLS, LMG, SMQ, TQT, VGS, VSG, VMA, IGG, IAG, TGR, LSH, VQT, RNS, TLP, TKQ, LGQ, NMQ, NVQ, RGG, VMS, TTG, LSR, MAP, ILG, TGT, TSS, TSH, RIG, SAM, TSM, SMG, SMS, TSG, TGA, VNS, VAG, IGS, LGS, VNG, LTA, VQN, TKS, SVG, NAS, TSA, TAN, LTS, RSQ, RIP, RVE, VLP, SVA, LQQ, LST, SAA, RTS, TQN, VNA, or LMS; and/or
   [0423] (iv) [E] is or comprises: VQN, VPN, VKN, DQN, VQH, FQN, VQS, VQT, VQP, VRN, AQN, VQK, EQN, VQI, LQN, GQT, VLN, or VQD.
[0424] 173. The AAV capsid variant of any one of embodiments 159-172, wherein [A][B][C][D][E] comprises:
   [0425] (i) the amino acid sequence of any of SEQ ID NOs: 143, 148, 149, 151, 153, 154-158, 160-163, 166, 168, 170, 171, 173-175, 177-179, 181, 182, 184-188, 191-197, 199-210, 212-215, 217-225, 227-231, 233, 234, 236-240, 243-262, 265, 267, 268, 270-277, 279, 282, 284-286, 288-293, 295, 296, 298, 300-314, 316-327, 329, 331, 332, 334, 336, 337-344, 346-350, 352-354, 356-365, 367, 369, 371-380, 382-385, 387, 392-394, 396, 397, 399-401, 404-411, 413-415, 417, 419-429, 432, 433, 435-437, 438, 440-442, 444-447, 450-454, 456, 458-461, 464, 465, 467-469, 471-484, 487-495, 497, 498, 500-503, 505, 507-512, 514-517, 522-525, 528-539, 542-545, 547, 551-555, 558-561, 563-568, 570, 573, 574, 576, 579, 581, 582, 584, 586, 587, 591-596, 598, 601, 604, 605, 606, 607, 610, 612, 614-619, 624-629, 631-636, 640, 641, 645, 646, 649, 650, 656, 658, 661, 663, 664, 666, 668, 669, 670, 672, 673, 674, 675, 677, 679, 683, 684, 686, 688, 689, 691, 693, 695, 696, 697, 699, 700, 701, 702, 704-706, 709-714, 720, 722, 725-731, 733, 736, 740, 745, 749-752, 754, 755, 757, 758, 760-765, 767, 768, 770, 771, 773, 778-780, 783-788, 792-794, 797-799, 801, 802, 804-806, 812, 814, 815, 817, 818, 820, 821, 824, 828, 831, 832, 834-837, 839, 840-845, 847, 848, 850-855, 857-859, 861, 862, 865, 866, 869-872, 874-876, 882-884, 887, 889-895, 897, 899, 901, 903-905, 907, 908, 910, 911, 913, 915, 919, 920, 923, 924, 926, 927, 929, 931-933, 935, 937, 939-949, 952-955, 957, 958, 960, 962, 964, 965, 967, 971, 973, 974, 976, 977, 981, 985-989, 992, 994, 997-1000, 1002, 1004, 1006-1008, 1010, 1013, 1015, 1017, 1018, 1020, 1021, 1023-1025, 1027, 1029-1031, 1033-1035, 1037-1040, 1043, 1046, 1049, 1052, 1053, 1056, 1057, 1059, 1062, 1064, 1065, 1067, 1068, 1070, 1073, 1075, 1077-1080,1083-1087, 1089, 1090, 1093, 1094, 1097, 1100, 1101, 1103, 1105-1107, 1110-1112, 1114-1117, 1119, 1121, 1125, 1126, 1129, 1132, 1133, 1135;
   [0426] (ii) an amino acid sequence comprising any portion of an amino acid sequence in (i), e.g., any 2, 3, 4, 5, 6, 7, 8, 9, 10, 11, 12, 13, 14, 15, 16, 17, or 18 amino acids, e.g., consecutive amino acids, thereof;
   [0427] (iii) an amino acid sequence comprising at least one, two, or three but no more than four modifications, e.g., substitutions (e.g., conservative substitutions), insertions, or deletions, relative to any of the amino acid sequences in (i); or
   [0428] (iv) an amino acid sequence comprising at least one, two, or three but no more than four different amino acids, relative to any one of the amino acid sequences in (i).
[0429] 174. The AAV capsid variant of any one of embodiments 159-173, wherein [A][B][C][D][E] comprises:
   [0430] (i) the amino acid sequence of any of SEQ ID NOs: 139, 143, 148, 149, 151, 153-158, 160-163, 166, 168, 170, 171, 173-175, 177-179, 181, 182, 184-188, 191-197, 199, 200, 201-210, 212-215, 217-225, 227-231, 233, 234, 236-240, 243-262, 265, 267, 268, 270-277, 279, 282, 284-286, 288-293, 295, 296, 298, 300-314, 316-327, 329, 331, 332, 334, 336, 337-344, 346-350, 352-354, 356-365, 367, 369, 371-380, 382-385, 387, 392-394, 396, 397, 399-401, 404, 405, 406-411, 413-415, 417, 419-429, 432, 433, 435-438, 440-442, 444-447, 450-454, 456, 458-461, 464, 465, 467-469, or 471-476;
   [0431] (ii) an amino acid sequence comprising any portion of an amino acid sequence in (i), e.g., any 2, 3, 4, 5, 6, 7, 8, 9, 10, 11, 12, 13, 14, 15, 16, 17, or 18 amino acids, e.g., consecutive amino acids, thereof;
   [0432] (iii) an amino acid sequence comprising at least one, two, or three but no more than four modifications, e.g., substitutions (e.g., conservative substitutions), insertions, or deletions, relative to any of the amino acid sequences in (i); or
   [0433] (iv) an amino acid sequence comprising at least one, two, or three but no more than four different amino acids, relative to any one of the amino acid sequences in (i).
[0434] 175. The AAV capsid variant of any one of embodiments 159-174, wherein [A][B][C][D][E] comprises the amino acid sequence of PLNGAVHLYAQAQTGWVPN (SEQ ID NO: 314).
[0435] 176. The AAV capsid variant of any one of embodiments 159-174, wherein [A][B][C][D][E] comprises the amino acid sequence of PLNGAVHLYAQAQLSPVKN (SEQ ID NO: 566).
[0436] 177. The AAV capsid variant of any one of embodiments 159-174, wherein [A][B][C][D][E] comprises the amino acid sequence the amino acid sequence of PLNGAVHLYAQAQTGWVQN (SEQ ID NO: 476).
[0437] 178. The AAV capsid variant of any one of embodiments 159-177, wherein [A][B] is present in loop VIII.
[0438] 179. The AAV capsid variant of any one of embodiments 159-178, wherein [C], [D], and/or [E] is present in loop VIII.
[0439] 180. The AAV capsid variant of any one of embodiments 159-179, wherein [A][B][C][D][E] is present in loop VIII.
[0440] 181. The AAV capsid variant of any one of embodiments 119-180, which comprises an amino acid other than A at position 587 and/or an amino acid other than Q at position 588, numbered according to SEQ ID NO: 138.
[0441] 182. The AAV capsid variant of any one of embodiments 119-181, which comprises:
   [0442] (i) the amino acid P at position 587, numbered according to SEQ ID NO: 5, 8, 138, or 3636; and/or
   [0443] (ii) the amino acid L at position 588, numbered according to SEQ ID NO: 5, 8, 138, or 3636.
[0444] 183. The AAV capsid variant of any one of embodiments 119-182, wherein [A] is present immediately subsequent to position 586, relative to a reference sequence numbered according to the amino acid sequence of SEQ ID NO: 5, 8, 138, or 3636.
[0445] 184. The AAV capsid variant of any one of embodiments 119-183, wherein [A] is present immediately subsequent to position 586, and replaces positions 587 and 588 (e.g., A587 and Q588), numbered according to SEQ ID NO: 138.
[0446] 185. The AAV capsid variant of any one of embodiments 119-184, wherein [A] replaces positions 587 and 588 (e.g., A587 and Q588), numbered according to SEQ ID NO: 138.
[0447] 186. The AAV capsid variant of any one of embodiments 119-185, wherein [A] corresponds to positions 587-591 of SEQ ID NO: 5, 8, or 3636.
[0448] 187. The AAV capsid variant of any one of embodiments 119-186, wherein [B] is present immediately subsequent to [A].
[0449] 188. The AAV capsid variant of any one of embodiments 119-187, wherein [B] is present immediately subsequent to [A], wherein [A] is present immediately subsequent to position 586, relative to a reference sequence numbered according to the amino acid sequence of SEQ ID NO: 5, 8, 138, or 3636.
[0450] 189. The AAV capsid variant of any one of embodiments 119-188, wherein [B] is present immediately subsequent to [A], wherein [A] is present immediately subsequent to position 586 and replaces positions 587 and 588 (e.g., A587 and Q588), numbered according to SEQ ID NO: 138.
[0451] 190. The AAV capsid variant of any one of embodiments 119-189, wherein [B] corresponds to positions 592 to 595 of SEQ ID NO: 5, 8, or 3636.
[0452] 191. The AAV capsid variant of any one of embodiments 119-190, wherein [A][B] replaces positions 587 and 588 (e.g., A587 and Q588), numbered according to SEQ ID NO: 138.
[0453] 192. The AAV capsid variant of any one of embodiments 119-191, wherein [A][B] is present immediately subsequent to position 586, numbered according to SEQ ID NO: 5, 8, 138, or 3636.
[0454] 193. The AAV capsid variant of any one of embodiments 119-192, wherein [A][B] is present immediately subsequent to position 586 and replaces positions 587 and 588 (e.g., A587 and Q588), numbered according to SEQ ID NO: 138.
[0455] 194. The AAV capsid variant of any one of embodiments 119-193, wherein [A][B] corresponds to positions 587-595 of SEQ ID NO: 5, 8, or 3636.
[0456] 195. The AAV capsid variant of any one of embodiments 131-194, wherein [C] is present immediately subsequent to position 588, relative to a reference sequence numbered according to the amino acid sequence of SEQ ID NO: 138.
[0457] 196. The AAV capsid variant of any one of embodiments 131-195, wherein [C] replaces positions 589-592 (e.g., A589, Q590, A591, Q592), numbered according to the amino acid sequence of SEQ ID NO: 138.
[0458] 197. The AAV capsid variant of any one of embodiments 131-196, wherein [C] is present immediately subsequent to position 588, and replaces positions 589-592 (e.g., A589, Q590, A591, Q592), numbered according to the amino acid sequence of SEQ ID NO: 138.
[0459] 198. The AAV capsid variant of any one of embodiments 131-197, wherein [C] corresponds to positions 596-599 of SEQ ID NO: 5, 8, or 3636.
[0460] 199. The AAV capsid variant of any one of embodiments 131-198, wherein [A][B][C] is present immediately subsequent to position 586, numbered according to SEQ ID NO: 138.
[0461] 200. The AAV capsid variant of any one of embodiments 131-199, wherein [A][B][C] replaces positions 587-592 (e.g., A587, Q588, A589, Q590, A591, Q592), numbered according to SEQ ID NO: 138.
[0462] 201. The AAV capsid variant of any one of embodiments 131-200, wherein [A][B][C] is present immediately subsequent to position 586 and replaces positions 587-592 (e.g., A587, Q588, A589, Q590, A591, Q592), numbered according to SEQ ID NO: 138.
[0463] 202. The AAV capsid variant of any one of embodiments 131-201, wherein [A][B][C] corresponds to positions 587-599 of SEQ ID NO: 5, 8, or 3636.
[0464] 203. The AAV capsid variant of any one of embodiments 147-202, wherein [D] is present immediately subsequent to position 592, relative to a reference sequence numbered according to the amino acid sequence of SEQ ID NO: 138.
[0465] 204. The AAV capsid variant of any one of embodiments 147-203, wherein [D] replaces positions 593-595 (e.g., T593, G594, W595), numbered according to the amino acid sequence of SEQ ID NO: 138.
[0466] 205. The AAV capsid variant of any one of embodiments 147-204, wherein [D] is present immediately subsequent to position 592, and replaces positions 593-595 (e.g., T593, G594, W595), numbered according to the amino acid sequence of SEQ ID NO: 138.
[0467] 206. The AAV capsid variant of any one of embodiments 147-205, wherein [D] corresponds to positions 600-602 of SEQ ID NO: 5, 8, or 3636.
[0468] 207. The AAV capsid variant of any one of embodiments 147-206, wherein [C][D] is present immediately subsequent to position 588, numbered according to SEQ ID NO: 138.
[0469] 208. The AAV capsid variant of any one of embodiments 147-207, wherein [C][D] replaces positions 589-595 (e.g., A589, Q590, A591, Q592, T593, G594, W595), numbered according to the amino acid sequence of SEQ ID NO: 138.
[0470] 209. The AAV capsid variant of any one of embodiments 147-208, wherein [C][D] is present immediately subsequent to 588, and replaces positions 589-595 (e.g., A589, Q590, A591, Q592, T593, G594, W595), numbered according to the amino acid sequence of SEQ ID NO: 138.
[0471] 210. The AAV capsid variant of any one of embodiments 147-209, wherein [C][D] corresponds to positions 596-602 of SEQ ID NO: 5, 8, or 3636.
[0472] 211. The AAV capsid variant of any one of embodiments 147-210, wherein [A][B][C][D] is present immediately subsequent to position 586, numbered according to SEQ ID NO: 5, 8, 138, or 3636.
[0473] 212. The AAV capsid variant of any one of embodiments 147-211, wherein [A][B][C][D] replaces positions 587-595 (e.g., A587, Q588, A589, Q590, A591, Q592, T593, G594, W595), numbered according to SEQ ID NO: 138.
[0474] 213. The AAV capsid variant of any one of embodiments 147-212, wherein [A][B][C][D] is present immediately subsequent to position 586 and replaces positions 587-595 (e.g., A587, Q588, A589, Q590, A591, Q592, T593, G594, W595), numbered according to SEQ ID NO: 138.
[0475] 214. The AAV capsid variant of any one of embodiments 147-213, wherein [A][B][C][D] corresponds to positions 587-602 of SEQ ID NO: 5, 8, or 3636.
[0476] 215. The AAV capsid variant of any one of embodiments 159-92, wherein [E] is present immediately subsequent to position 595, relative to a reference sequence numbered according to the amino acid sequence of SEQ ID NO: 138.
[0477] 216. The AAV capsid variant of any one of embodiments 159-92, wherein [E] replaces positions 596-598 (e.g., V596, Q597, N598), numbered according to the amino acid sequence of SEQ ID NO: 138.
[0478] 217. The AAV capsid variant of any one of embodiments 159-216, wherein [E] is present immediately subsequent to position 595, and replaces positions 596-598 (e.g., V596, Q597, N598), numbered according to the amino acid sequence of SEQ ID NO: 138.
[0479] 218. The AAV capsid variant of any one of embodiments 159-217, wherein [E] corresponds to positions 603 to 605 of SEQ ID NO: 5, 8, or 3636.
[0480] 219. The AAV capsid variant of any one of embodiments 159-218, wherein [A][B][C][D][E] is present immediately subsequent to position 586, relative to a reference sequence numbered according to the amino acid sequence of SEQ ID NO: 5, 8, 138, or 3636.
[0481] 220. The AAV capsid variant of any one of embodiments 159-219, wherein [A][B][C][D][E] replaces positions 587-598 (e.g., A587, Q588, A589, Q590, A591, Q592, T593, G594, W595, V596, Q597, N598), numbered according to SEQ ID NO: 138.
[0482] 221. The AAV capsid variant of any one of embodiments 159-220, wherein [A][B][C][D][E] is present immediately subsequent to position 586 and replaces positions 587-598 (e.g., A587, Q588, A589, Q590, A591, Q592, T593, G594, W595, V596, Q597, N598), numbered according to SEQ ID NO: 138.
[0483] 222. The AAV capsid variant of any one of embodiments 159-221, wherein [A][B][C][D][E] corresponds to positions 587-605 of SEQ ID NO: 5, 8, or 3636.
[0484] 223. The AAV capsid variant of any one of embodiments 119-222, which comprises from N-terminus to C-terminus, [A][B].
[0485] 224. The AAV capsid variant of any one of embodiments 131-223, which comprises from N-terminus to C-terminus, [A][B][C].
[0486] 225. The AAV capsid variant of any one of embodiments 147-224, which comprises from N-terminus to C-terminus, [A][B][C][D].
[0487] 226. The AAV capsid variant of any one of embodiments 159-225, which comprises from N-terminus to C-terminus, [A][B][C][D][E].
[0488] 227. An AAV capsid variant, comprising PLNGAVHLY (SEQ ID NO: 3648) and optionally wherein the AAV capsid variant further comprises one, two, or all of an amino acid other than T at position 593 (e.g., A, L, R, V, C, I, K, M, N, P, Q, S), an amino acid other than G at position 594 (e.g., M, S, A, Q, V, T, L, P, H, K, N, I, Y, or R), and/or an amino acid other than W at position 595 (e.g., S, P, T, A, G, L, Q, H, N, R, K, V, E, F, M, C, or Y), relative to a reference sequence numbered according to the amino acid sequence of SEQ ID NO: 138.
[0489] 228. The AAV capsid variant of embodiment 227, which comprises:
   [0490] (i) the amino acid T, A, L, R, V, C, I, K, M, N, P, Q, or S at position 593 numbered according to SEQ ID NO: 138 or at position 600 numbered according to SEQ ID NO: 5, 8, or 3636;
   [0491] (ii) the amino acid G, M, S, A, Q, V, T, L, P, H, K, N, I, Y, or R at position 594 numbered according to SEQ ID NO: 138 or at position 601 numbered according to SEQ ID NO: 5, 8, or 3636; and/or
   [0492] (iii) the amino acid W, S, P, T, A, G, L, Q, H, N, R, K, V, E, F, M, C or Y at position 595 numbered according to SEQ ID NO: 138 or at position 602 numbered according to SEQ ID NO: 5, 8, or 3636.
[0493] 229. An AAV capsid variant, comprising the amino acid sequence of PLNGAVHLY (SEQ ID NO: 3648); and which further comprises one, two, or all of:
   [0494] (i) the amino acid T, A, L, R, V, C, I, K, M, N, P, Q, or S at position 593 numbered according to SEQ ID NO: 138 or at position 600 numbered according to SEQ ID NO: 5, 8, or 3636;
   [0495] (ii) the amino acid G, M, S, A, Q, V, T, L, P, H, K, N, I, Y, or R at position 594 numbered according to SEQ ID NO: 138 or at position 601 numbered according to SEQ ID NO: 5, 8, or 3636; and/or
   [0496] (iii) the amino acid W, S, P, T, A, G, L, Q, H, N, R, K, V, E, F, M, C, or Y at position 595 numbered according to SEQ ID NO: 138 or at position 602 numbered according to SEQ ID NO: 5, 8, or 3636;
   [0497] optionally, provided that the amino acids at positions 593-595 numbered according to SEQ ID NO: 138 or at positions 600-602 numbered according to SEQ ID NO: 5, 8, or 3636, does not comprise the amino acid sequence of TGW.
[0498] 230. The AAV capsid variant of any one of embodiments 227-229, which comprises:
   [0499] (i) the amino acid L at position 593 numbered according to SEQ ID NO: 138 or at position 600 numbered according to SEQ ID NO: 5, 8, or 3636;
   [0500] (ii) the amino acid S at position 594 numbered according to SEQ ID NO: 138 or at position 601 numbered according to SEQ ID NO: 5, 8, or 3636; and/or
   [0501] (iii) the amino acid P at position 595 numbered according to SEQ ID NO: 138 or at position 602 numbered according to SEQ ID NO: 5, 8, or 3636.
[0502] 231. The AAV capsid variant of any one of embodiments 227-230, which comprises the amino acid sequence TMS, ASP, LGS, LSS, RST, TAA, TAG, TAL, TAS, TGT, TMA, TQP, TSA, TSP, TST, TVA, TVS, VMS, VSP, VSS, VTP, TGP, VAS, AAA, AAP, AGP, AGW, ALP, AMS, AQP, ATG, ATP, ATQ, ATS, AVG, CSP, CTP, IAA, IAG, IAS, IGG, IGS, IGW, ILG, IPP, IQP, IQS, ISG, ISP, ISS, ITP, KGW, KSS, LAA, LAG, LAH, LAN, LAP, LAQ, LAR, LAS, LAT, LGP, LGQ, LGT, LHP, LKS, LLP, LMA, LMG, LMP, LMQ, LMS, LNP, LPP, LQP, LQQ, LQR, LSA, LSG, LSH, LSK, LSN, LSP, LSQ, LSR, LST, LTA, LTN, LTP, LTS, LVG, MAP, NAL, NAQ, NAS, NLP, NMQ, NQP, NSP, NTP, NTQ, NTT, NVQ, PGW, QAP, QSP, RAA, RAG, RAQ, RAS, RGG, RGS, RGW, RIA, RIG, RIP, RLG, RLP, RLS, RLT, RML, RMS, RNS, RPG, RPP, RQG, RQL, RQP, RQQ, RQS, RSA, RSG, RSP, RSQ, RSS, RSV, RTA, RTG, RTL, RTP, RTQ, RTS, RTT, RVE, RYS, SAA, SAF, SAG, SAK, SAL, SAM, SAN, SAP, SAQ, SAV, SGP, SLP, SMA, SMG, SMQ, SMS, SPP, SQL, SQM, SQP, SQQ, SSL, SSM, SSP, SSR, SSS, STP, STQ, STS, SVA, SVG, SVQ, SVS, TAK, TAM, TAN, TAP, TAQ, TAT, TAV, TAW, TGA, TGC, TGF, TGG, TGL, TGM, TGQ, TGR, TGS, TGV, TGY, TKA, TKP, TKQ, TKS, TLA, TLG, TLP, TLQ, TLR, TLS, TMG, TMK, TMM, TMN, TMP, TMQ, TMT, TNA, TNG, TNQ, TNS, TPA, TPG, TPP, TPQ, TPR, TPS, TPT, TPW, TQA, TQH, TQK, TQL, TQM, TQN, TQQ, TQR, TQT, TQW, TRW, TSG, TSH, TSK, TSL, TSM, TSN, TSQ, TSS, TSV, TSW, TTA, TTG, TTK, TTP, TTQ, TTR, TTS, TTT, TVG, TVQ, TVW, TYA, TYS, VAA, VAG, VAK, VAN, VAQ, VAT, VGG, VGK, VGN, VGS, VHP, VKA, VKP, VKQ, VLG, VLP, VLS, VMA, VMP, VMQ, VNA, VNG, VNS, VPA, VPP, VPQ, VQA, VQG, VQN, VQP, VQQ, VQS, VQT, VRP, VSA, VSG, VSN, VSQ, VSR, VST, VTA, VTG, VTK, VTS, or VAP at positions 593-595 numbered according to SEQ ID NO: 138 or at positions 600-602 numbered according to SEQ ID NO: 5, 8, or 3636.
[0503] 232. The AAV capsid variant of any one of embodiments 227-231, which comprises the amino acid sequence LSP at positions 593-595 numbered according to SEQ ID NO: 138, or at positions 600-602 numbered according to SEQ ID NO: 5, 8, or 3636.
[0504] 233. The AAV capsid variant of any one of embodiments 227-232, which further comprises:
   [0505] (i) one, two, three, or all of an amino acid other than A at position 589 (e.g., D, S, or T), an amino acid other than Q at position 590 (e.g., K, H, L, P, or R), an amino acid other than A at position 591 (e.g., P or E), and/or an amino acid other than Q at position 592 (e.g., H, K, or P), numbered according to SEQ ID NO: 138;
   [0506] (ii) one, two, three, or all of an amino acid other than A at position 596 (e.g., D, S, or T), an amino acid other than Q at position 597 (e.g., K, H, L, P, or R), an amino acid other than A at position 598 (e.g., P or E), and/or an amino acid other than Q at position 599 (e.g., H, K, or P), numbered according to SEQ ID NO: 5, 8, or 3636.
[0507] 234. The AAV capsid variant of any one of embodiments 227-233, wherein:
   [0508] (i) the amino acid A, D, S, or T at position 589 numbered according to SEQ ID NO: 138, or at position 596 numbered according to SEQ ID NO: 5, 8, or 3636;
   [0509] (ii) the amino acid Q, K, H, L, P, or R at position 590 numbered according to SEQ ID NO: 138, or at position 597 numbered according to SEQ ID NO: 5, 8, or 3636;
   [0510] (iii) the amino acid A, E, or P at position 591 numbered according to SEQ ID NO: 138, or at position 598 numbered according to SEQ ID NO: 5, 8, or 3636; and/or
   [0511] (iv) the amino acid Q, H, K, or P at position 592 numbered according to SEQ ID NO: 138, or at position 599 numbered according to SEQ ID NO: 5, 8, or 3636.
[0512] 235. The AAV capsid variant of any one of embodiments 227-234, which comprise the amino acid sequence of:
   [0513] (i) AQAQ (SEQ ID NO: 4737), AHAQ (SEQ ID NO: 4742), AKAQ (SEQ ID NO: 4741), ALAQ (SEQ ID NO: 4749), APAQ (SEQ ID NO: 4745), AQAH (SEQ ID NO: 4747), AQAK (SEQ ID NO: 4746), AQAP (SEQ ID NO: 4743), AQEQ (SEQ ID NO: 4748), AQPQ (SEQ ID NO: 4739), ARAQ (SEQ ID NO: 4750), DQAQ (SEQ ID NO: 4744), SQAQ (SEQ ID NO: 4738), or TQAQ (SEQ ID NO: 4751) at positions 589-592 numbered according to SEQ ID NO: 138 or at positions 596-599 numbered according to SEQ ID NO: 5, 8, or 3636; or
   [0514] (ii) AQAQ (SEQ ID NO: 4737), AKAQ (SEQ ID NO: 4741), AQPQ (SEQ ID NO: 4739), DQAQ (SEQ ID NO: 4744), or SQAQ (SEQ ID NO: 4738) at positions 589-592 numbered according to SEQ ID NO: 138 or at positions 596-599 numbered according to SEQ ID NO: 5, 8, or 3636.
[0515] 236. The AAV capsid variant of any one of embodiments 227-235, which further comprises:
   [0516] (i) one, two, or all of an amino acid other than V at position 596 (e.g., G, F, D, L, A, I, or E), an amino acid other than Q at position 597 (e.g., K, R, H, E, L, or P), and/or an amino acid other than N at position 598 (e.g., H, K, T, I, S, D, P, or Y), numbered according to SEQ ID NO: 138; or
   [0517] (ii) one, two, or all of an amino acid other than V at position 603 (e.g., G, F, D, L, A, I, or E), an amino acid other than Q at position 604 (e.g., K, R, H, E, L, or P), and/or an amino acid other than N at position 605 (e.g., H, K, T, I, S, D, P, or Y), numbered according to SEQ ID NO: 5, 8, or 3636.
[0518] 237. The AAV capsid variant of any one of embodiments 227-237, wherein:
   [0519] (i) the amino acid V, G, F, D, L, A, I, or E at position 596 numbered according to SEQ ID NO: 138 or at position 603 numbered according to SEQ ID NO: 5, 8, or 3636;
   [0520] (ii) the amino acid Q, K, R, H, E, L, or P at position 597, numbered according to SEQ ID NO: 138 or at position 604 numbered according to SEQ ID NO: 5, 8, or 3636; and/or
   [0521] (iii) the amino acid N, H, K, T, I, S, D, P, or Y at position 598 numbered according to SEQ ID NO: 138 or at position 605 numbered according to SEQ ID NO: 5, 8, or 3636.
[0522] 238. An AAV capsid variant, comprising PLNGAVHLY (SEQ ID NO: 3648), and optionally wherein the AAV capsid variant further comprises one, two, or all of an amino acid other than V at position 596 (e.g., G, F, D, L, A, I, or E), an amino acid other than Q at position 597 (e.g., K, R, H, E, L, or P), and/or an amino acid other than N at position 598 (e.g., H, K, T, I, S, D, P, or Y), numbered according to SEQ ID NO: 138.
[0523] 239. An AAV capsid variant, comprising PLNGAVHLY (SEQ ID NO: 3648), and further comprising one, two, or all of:
   [0524] (i) V, G, F, D, L, A, I, or E at position 596 numbered according to SEQ ID NO: 138 or at position 603 numbered according to SEQ ID NO: 5, 8, or 3636;
   [0525] (ii) Q, K, R, H, E, L, or P at position 597 numbered according to SEQ ID NO: 138 or at position 604 numbered according to SEQ ID NO: 5, 8, or 3636; and/or
   [0526] (iii) N, H, K, T, I, S, D, P, or Y at position 598 numbered according to SEQ ID NO: 138 or at position 605 numbered according to SEQ ID NO: 5, 8, or 3636;
   [0527] optionally, provided that the amino acids at positions 596-598 numbered according to the amino acid sequence of SEQ ID NO: 138 or positions 603-605 of SEQ ID NO: 5, 8, or 3636, does not comprise the amino acid sequence of VQN.
[0528] 240. The AAV capsid variant of any one of embodiments 227-239, which comprises the amino acid P at position 597 numbered according to SEQ ID NO: 138 or at position 604 numbered according to SEQ ID NO: 5, 8, or 3636.
[0529] 241. The AAV capsid variant of any one of embodiments 227-339, which comprises the amino acid K at position 597 numbered according to SEQ ID NO: 138 or at position 604 numbered according to SEQ ID NO: 5, 8, or 3636.
[0530] 242. The AAV capsid variant of any one of embodiments 227-241, which comprises the amino acid sequence of:
   [0531] (i) GQN, VQH, VQK, VQT, VQN, FQN, VKN, VQI, DQN, LQN, VQS, VRN, AQN, IQN, VHN, VLN, VEN, VQD, DKN, EQN, FQK, GHN, GQT, VKK, VKT, VPH, VPN, VQP, or VQY at positions 596-598 numbered according to SEQ ID NO: 138 or positions 603-605 numbered according to SEQ ID NO: 5, 8, or 3636; or
   [0532] (ii) VQN, VQT, VQK, DQN, VQH, FQN, AQN, VLN, LQN, VQI, VQS, EQN, GQT, VPN, VQD, VQP, VRN, or VKN at positions 596-598 numbered according to SEQ ID NO: 138 or positions 603-605 numbered according to SEQ ID NO: 5, 8, or 3636.
[0533] 243. The AAV capsid variant of any one of embodiments 227-242, which comprises the amino acid sequence of VKN, VPN, or VQN at positions 596-598 numbered according to SEQ ID NO: 138 or positions 603-605 numbered according to SEQ ID NO: 5, 8, or 3636.
[0534] 244. The AAV capsid variant of any one of embodiments 227-242, which comprises the amino acid sequence of VEN or VHN at positions 596-598 numbered according to SEQ ID NO: 138 or positions 603-605 numbered according to SEQ ID NO: 5, 8, or 363.
[0535] 245. The AAV capsid variant of any one of embodiments 227-244, which comprises:
   [0536] (i) the amino acid sequence of any of SEQ ID NOs: 143, 148, 149, 151, 153-158, 160-163, 166, 168, 170, 171, 173-175, 177-179, 181, 182, 184-188, 191-197, 199-210, 212-215, 217-225, 227-231, 233, 234, 236-240, 243-262, 265, 267, 268, 270-277, 279, 282, 284, 285, 286, 288-293, 295, 296, 298, 300-314, 316-318, 320-327, 329, 331, 332, 334, 336-344, 346-350, 352-354, 356-367, 369, 371-380, 382-385, 387, 392-394, 396, 397, 399-401, 404-411, 413-415, 417, 419-429, 432, 433, 435-437, 438, 440-442, 444-447, 450-453, 456, 458-461, 464, 465, 467-469, 471-478, 480-483, 487-495, 497, 498, 500-503, 505, 507-512, 515-517, 522-525, 528-532, 534-539, 542-545, 547, 551-554, 558-561, 563-568, 570, 573, 574, 576, 579, 581, 582, 584, 586, 587, 592-596, 598, 601, 604-607, 610, 612, 614-619, 624-629, 631, 633-636, 640, 641, 645, 646, 649, 650, 658, 663, 664, 666, 668, 669, 672, 673, 675, 679, 683, 684, 686, 688, 689, 691, 693, 695, 697, 699, 700, 704, 705, 709-712, 720, 722, 726-731, 733, 736, 740, 745, 749, 750-752, 754, 755, 757, 758, 760-765, 767, 768, 771, 778, 780, 783-787, 792, 794, 797, 799-802, 804, 817, 818, 821, 824, 828, 831, 832, 834-837, 840-845, 847, 848, 851-853, 855, 858, 861, 862, 865, 869, 870-872, 874, 876, 882, 883, 887, 889, 890, 892-895, 897, 901, 903, 904, 905, 907, 910, 911, 913, 915, 919, 920, 923, 924, 926, 927, 929, 931-933, 935, 937, 940, 941, 943, 945-949, 953, 955, 957, 958, 960, 962, 964, 965, 971, 973, 974, 977, 986, 988, 989, 992, 994, 997, 998, 1000, 1004, 1007, 1013, 1015, 1017, 1018, 1020, 1025, 1027, 1029, 1030, 1031, 1033-1035, 1037-1039, 1043, 1046, 1049, 1052, 1056, 1057, 1059, 1062, 1065, 1067, 1068, 1070, 1073, 1075, 1077-1079, 1083-1087, 1089, 1090, 1094, 1100, 1101, 1103, 1106, 1107, 1110, 1111, 1112, 1114, 1115, 1117, 1119, 1125, 1126, 1129, 1132, or 1133;
   [0537] (ii) an amino acid sequence comprising any portion of an amino acid sequence in (i), e.g., any 2, 3, 4, 5, 6, 7, 8, 9, 10, 11, 12, 13, 14, 15, 16, 17, or 18 amino acids, e.g., consecutive amino acids, thereof;
   [0538] (iii) an amino acid sequence comprising at least one, two, or three but no more than four modifications, e.g., substitutions (e.g., conservative substitutions), insertions, or deletions, relative to any of the amino acid sequences in (i); or
   [0539] (iv) an amino acid sequence comprising at least one, two, or three but no more than four different amino acids, relative to any one of the amino acid sequences in (i).
[0540] 246. The AAV capsid variant of any one of embodiments 227-245, which comprises:
   [0541] (i) the amino acid sequence of any of SEQ ID NOs: 143, 148-151, 153-158, 160-163, 166, 168, 170, 171, 173-175, 177-179, 181, 182, 184-188, 191-197, 199-210, 212-215, 217-225, 227-231, 233, 234, 236-240, 243-262, 265, 267, 268, 270-277, 279, 282, 284-286, 288-293, 295, 296, 298, 300-314, 316-318, 320-327, 329, 331, 332, 334, 336, 337-339, 340-344, 346-350, 352-354, 356-365, 367, 369, 371-380, 382-385, 387, 392-394, 396, 397, 399-401, 404-411, 413-415, 417, 419, 420-429, 432, 433, 435-438, 440-442, 444-447, 450-453, 456, 458, 459, 460, 461, 464, 465, 467-469, or 471-476;
   [0542] (ii) an amino acid sequence comprising any portion of an amino acid sequence in (i), e.g., any 2, 3, 4, 5, 6, 7, 8, 9, 10, 11, 12, 13, 14, 15, 16, 17, or 18 amino acids, e.g., consecutive amino acids, thereof;
   [0543] (iii) an amino acid sequence comprising at least one, two, or three but no more than four modifications, e.g., substitutions (e.g., conservative substitutions), insertions, or deletions, relative to any of the amino acid sequences in (i); or
   [0544] (iv) an amino acid sequence comprising at least one, two, or three but no more than four different amino acids, relative to any one of the amino acid sequences in (i).
[0545] 247. The AAV capsid variant of any one of embodiments 227-246, wherein the amino acid sequence of PLNGAVHLY (SEQ ID NO: 3648) is present in loop VIII.
[0546] 248. The AAV capsid variant of any one of embodiments 227-247, wherein the amino acid sequence of PLNGAVHLY (SEQ ID NO: 3648) is present immediately subsequent to position 586, relative to a reference sequence numbered according to SEQ ID NO: 5, 8, 138, or 3636.
[0547] 249. The AAV capsid variant of any one of embodiments 227-248, wherein the amino acid sequence of PLNGAVHLY (SEQ ID NO: 3648) replaces positions 587 and 588 (e.g., A587 and Q588), numbered according to SEQ ID NO: 138.
[0548] 250. The AAV capsid variant of any one of embodiments 227-249, wherein the amino acid sequence of PLNGAVHLY (SEQ ID NO: 3648) is present immediately subsequent to position 586 and replaces positions 587 and 588 (e.g., A587 and Q588), numbered according to SEQ ID NO: 138.
[0549] 251. The AAV capsid variant of any one of embodiments 227-111, wherein the amino acid sequence of PLNGAVHLY (SEQ ID NO: 3648) corresponds to positions 587-595 of SEQ ID NO: 5, 8, or 3636.
[0550] 252. An AAV capsid variant comprising X1-X2-X3-X4-X5-X6-X7-X8-X9-X10-X11-X12-X13-X14-X15-X16-X17-X18-X19, wherein:
   [0551] (i) X1 is: P, A, D, E, F, G, H, K, L, N, Q, R, S, T, or V;
   [0552] (ii) X2 is: L, D, E, F, H, I, M, N, P, Q, R, S, or V;
   [0553] (iii) X3 is: N, A, D, E, G, H, I, K, Q, S, T, V, or Y;
   [0554] (iv) X4 is: G, A, C, D, E, P, Q, R, S, T, V, or W;
   [0555] (v) X5 is: A, C, D, E, F, G, H, I, K, N, P, Q, R, S, T, V, W, or Y;
   [0556] (vi) X6 is: V, A, C, D, E, F, G, H, I, K, L, M, N, Q, R, S, T, or Y;
   [0557] (vii) X7 is: H, A, D, E, G, I, K, L, M, N, P, Q, R, S, T, V, or Y;
   [0558] (viii) X8 is: L, A, D, E, F, G, H, I, K, M, N, P, Q, R, S, T, V, or Y;
   [0559] (ix) X9 is: Y, A, C, D, E, F, G, H, I, K, L, M, N, Q, R, S, T, V, or W;
   [0560] (x) X10 is: A, C, D, E, F, G, H, I, K, L, N, P, Q, R, S, T, V, or; Y;
   [0561] (xi) X11 is: Q, A, D, E, H, K, L, P, R, or T;
   [0562] (xii) X12 is: A, D, E, G, H, L, N, P, Q, R, S, T, or V;
   [0563] (xiii) X13 is: Q, E, H, K, L, P, R, or T;
   [0564] (xiv) X14 is: T, A, C, D, E, F, G, H, I, K, L, M, N, P, Q, R, S, V, W, or Y;
   [0565] (xv) X15 is: G, A, C, D, E, F, H, I, K, L, M, N, P, Q, R, S, T, V, W, or Y;
   [0566] (xvi) X16 is: W, A, C, D, E, F, G, H, I, K, L, M, N, P, Q, R, S, T, V, or Y;
   [0567] (xvii) X17 is: V, A, D, E, F, G, H, I, or L;
   [0568] (xviii) X18 is: Q, E, H, K, L, P, or R; and/or
   [0569] (xix) X19 is: N, D, H, I, K, P, S, T, or Y.
[0570] 253. The AAV capsid variant of embodiment 252, wherein:
   [0571] (i) X1 is: P, Q, A, S, T, R, H, L, or K;
   [0572] (ii) X2 is: L, I, V, H, or R;
   [0573] (iii) X3 is: N, D, K, Y, or I;
   [0574] (iv) X4 is: G, S, R, C, or A;
   [0575] (v) X5 is: A, S, G, N, T, D, Y, Q, V, or C;
   [0576] (vi) X6 is: V, I, L, A, F, D, or G;
   [0577] (vii) X7 is: H, N, Q, P, D, L, R, or Y;
   [0578] (viii) X8 is: L, H, V, I, or R;
   [0579] (ix) X9 is Y;
   [0580] (x) X10 is: A, D, S, or T;
   [0581] (xi) X11 is: Q, K, H, L, P, or R;
   [0582] (xii) X12 is: A, P, E, or S;
   [0583] (xiii) X13 is: Q, K, H, or P;
   [0584] (xiv) X14 is: L, T, V, S, R, I, A, N, C, P, Q, M, or K;
   [0585] (xv) X15 is: S, G, M, T, A, K, Q, V, I, R, N, P, L, H, Y;
   [0586] (xvi) X16 is: P, W, S, K, Q, G, C, R, A, N, T, V, M, H, L, E, F, or Y;
   [0587] (xvii) X17 is: V, D, F, A, E, L, G, or I;
   [0588] (xviii) X18 is: Q, R, P, K, L, H, or E; and/or
   [0589] (xix) X19 is: N, H, D, S, T, P, K, I, or Y.
[0590] 254. The AAV capsid variant of embodiment 252, wherein:
   [0591] (i) X1 is: P, A, S, Q, or T;
   [0592] (ii) X2 is L or I;
   [0593] (iii) X3 is N or D;
   [0594] (iv) X4 is G or S;
   [0595] (v) X5 is: A, S, G, N, or T;
   [0596] (vi) X6 is V;
   [0597] (vii) X7 is H;
   [0598] (viii) X8 is: L, H, V, or I
   [0599] (ix) X9 is Y;
   [0600] (x) X10 is: A, D, or S;
   [0601] (xi) X11 is Q or K;
   [0602] (xii) X12 is A or P;
   [0603] (xiii) X13 is Q;
   [0604] (xiv) X14 is: L, T, V, S, R, I, A, N, C, P, Q, or M;
   [0605] (xv) X15 is: S, G, M, T, A, K, Q, V, I, R, N, P, L, or H;
   [0606] (xvi) X16 is: P, W, S, K, Q, G, C, R, A, N, T, V, M, H, L, or E;
   [0607] (xvii) X17 is: V, D, F, A, E, L, or G;
   [0608] (xviii) X18 is: Q, R, P, K, or L; and/or
   [0609] (xix) X19 is: N, H, D, S, T, P, K, or I.
[0610] 255. The AAV capsid variant of any one of embodiments 252-254, wherein X1-X2-X3-X4-X5-X6-X7-X8-X9-X10-X11-X12-X13-X14-X15-X16-X17-X18-X19 is present immediately subsequent to position 586, numbered according to SEQ ID NO: 5, 8, 138, or 3636.
[0611] 256. The AAV capsid variant of any one of embodiments 252-255, wherein X1-X2-X3-X4-X5-X6-X7-X8-X9-X10-X11-X12-X13-X14-X15-X16-X17-X18-X19 replaces positions 587-598 (e.g., A587, Q588, A589, Q590, A591, Q592, T593, G594, W595, V596, Q597, N598), numbered according to SEQ ID NO: 138.
[0612] 257. The AAV capsid variant of any one of embodiments 252-256, wherein X1-X2-X3-X4-X5-X6-X7-X8-X9-X10-X11-X12-X13-X14-X15-X16-X17-X18-X19 is present immediately subsequent to position 586 and replaces positions 587-598 (e.g., A587, Q588, A589, Q590, A591, Q592, T593, G594, W595, V596, Q597, N598), numbered according to SEQ ID NO: 138.
[0613] 258. The AAV capsid variant of any one of embodiments 252-257, wherein X1-X2-X3-X4-X5-X6-X7-X8-X9-X10-X11-X12-X13-X14-X15-X16-X17-X18-X19 corresponds to positions 587-605 of SEQ ID NO: 5, 8, or 3636.
[0614] 259. An AAV capsid variant comprising an amino sequence comprising the following formula: [N1]-[N2], wherein:
   [0615] (i) [N1] comprises the amino acid sequence of PLNG (SEQ ID NO: 3678); and
   [0616] (ii) [N2] comprises X1, X2, and X3, wherein:
      [0617] (a) position X1 is: A, V, T, or G;
      [0618] (b) position X2 is: R, K, Q, G, or V; and
      [0619] (c) position X3 is: H, A, M, S, T, Q, or Y, or; and/or
   [0620] an amino acid modification, e.g., a conservative substitution, of any of the aforesaid amino acids in (i) and/or (ii).
[0621] 260. An AAV capsid variant comprising one, two, or all of:
   [0622] (i) an [N1], wherein [N1] is or comprises: PLNN (SEQ ID NO: 4752), PLNG (SEQ ID NO: 3678), PSAR (SEQ ID NO: 4753), TLNG (SEQ ID NO: 4754), PLNM (SEQ ID NO: 4755), SLNG (SEQ ID NO: 4756), SING (SEQ ID NO: 4757), ALNG (SEQ ID NO: 4758), PLNL (SEQ ID NO: 4759), PGRQ (SEQ ID NO: 4760), or LVNS (SEQ ID NO: 4761);
   [0623] (ii) an [N2] wherein [N2] is or comprises: PGH, VKA, ARM, VKM, VRA, VRS, TRM, VRT, VRM, AKM, VKS, VQM, AVH, TRS, VRQ, AQM, VKY, ART, AGA, VQA, VKT, PVH, GVH, AGH, VGH, TGH, or TVR; and/or
   [0624] (iii) an [N3] wherein [N3] is or comprises: LY, IY, LN, DY, LS, or VS; and/or wherein the AAV capsid variant comprises an amino acid modification, e.g., a conservative substitution, of any of the aforesaid amino acids in (i)-(v).
[0625] 261. The AAV capsid variant of embodiment 259, wherein [N2] comprises VK, AR, VR, TR, AK, VQ, AQ, AG, GV, KA, RM, KM, RA, RS, RT, KS, QM, RQ, KY, GA, QA, KT, VH, or GH.
[0626] 262. The AAV capsid variant of any one of embodiments 259-261, wherein [N2] is or comprises VKA, ARM, VKM, VRA, VRS, TRM, VRT, VRM, AKM, VKS, VQM, TRS, VRQ, AQM, VKY, ART, AGA, VQA, VKT, GVH, AGH.
[0627] 263. The AAV capsid variant of any one of embodiments 259, 261, or 262, wherein [N1]-[N2] comprises:

(i)
(SEQ ID NO: 5438)
PLNGVK,
(SEQ ID NO: 5439)
PLNGAR,
(SEQ ID NO: 5440)
PLNGVR,
(SEQ ID NO: 5441)
PLNGTR,
(SEQ ID NO: 5442)
PLNGAK,
(SEQ ID NO: 5443)
PLNGVQ,
(SEQ ID NO: 5444)
PLNGAQ,
(SEQ ID NO: 5445)
PLNGAG,
or
(SEQ ID NO: 5446)
PLNGGV;

[0628] (ii) an amino acid sequence comprising any portion of an amino acid sequence in (i), e.g., any 2, 3, 4, or 5 amino acids, e.g., consecutive amino acids, thereof;
[0629] (iii) an amino acid sequence comprising at least one, two, or three but no more than four modifications, e.g., substitutions (e.g., conservative substitutions), insertions, or deletions, relative to any of the amino acid sequences in (i); or
[0630] (iv) an amino acid sequence comprising at least one, two, or three but no more than four different amino acids, relative to any one of the amino acid sequences in (i).
[0631] 264. The AAV capsid variant of any one of embodiments 259-263, wherein [N1]-[N2] is or comprises:

(i)
(SEQ ID NO: 5447)
PLNGVKA,
(SEQ ID NO: 5448)
PLNGARM,
(SEQ ID NO: 5449)
PLNGVKM,
(SEQ ID NO: 5450)
PLNGVRA,
(SEQ ID NO: 5451)
PLNGVRS,
(SEQ ID NO: 5452)
PLNGTRM,
(SEQ ID NO: 5453)
PLNGVRT,
(SEQ ID NO: 5454)
PLNGVRM,
(SEQ ID NO: 5455)
PLNGAKM,
(SEQ ID NO: 5456)
PLNGVKS,
(SEQ ID NO: 5457)
PLNGVQM,
(SEQ ID NO: 5458)
PLNGTRS,
(SEQ ID NO: 5459)
PLNGVRQ,
(SEQ ID NO: 5460)
PLNGAQM,
(SEQ ID NO: 5461)
PLNGVKY,
(SEQ ID NO: 5462)
PLNGART,
(SEQ ID NO: 5463)
PLNGAGA,
(SEQ ID NO: 5464)
PLNGVQA,
(SEQ ID NO: 5465)
PLNGVKT,
(SEQ ID NO: 5466)
PLNGGVH,
(SEQ ID NO: 5120)
PLNGAGH;

[0632] (ii) an amino acid sequence comprising any portion of an amino acid sequence in (i), e.g., any 2, 3, 4, 5, or 6 amino acids, e.g., consecutive amino acids, thereof;
[0633] (iii) an amino acid sequence comprising at least one, two, or three but no more than four modifications, e.g., substitutions (e.g., conservative substitutions), insertions, or deletions, relative to any of the amino acid sequences in (i); or
[0634] (iv) an amino acid sequence comprising at least one, two, or three but no more than four different amino acids, relative to any one of the amino acid sequences in (i).
[0635] 265. The AAV capsid variant of any one of embodiments 259-264, which further comprises [N3], wherein [N3] comprises X4 and X5, wherein:
   [0636] (a) position X4 is: L, I, or D; and
   [0637] (b) position X5 is: Y, S, or N; and/or
[0638] an amino acid modification, e.g., a conservative substitution, of any of the aforesaid amino acids in (a) or (b).
[0639] 266. The capsid variant of embodiment 260 or 265, wherein [N3] is or comprises LY, IY, DY, LS, or LN.
[0640] 267. The AAV capsid variant of embodiment 265 or 266, wherein [N2]-[N3] comprises: KAL, RMI, KML, RAL, RSL, RML, RTL, RML, RML, KML, KSL, QML, RSL, RQL, QML, KYL, RTI, GAD, QAL, KTL, VHL, GHL.
[0641] 268. The AAV capsid variant of any one of embodiments 265-267, wherein [N2]-[N3] comprises:

(i)
(SEQ ID NO: 5467)
VKAL,
(SEQ ID NO: 5468)
ARMI,
(SEQ ID NO: 5469)
VKML,
(SEQ ID NO: 5470)
VRAL,
(SEQ ID NO: 5471)
VRSL,
(SEQ ID NO: 5472)
TRML,
(SEQ ID NO: 5473)
VRTL,
(SEQ ID NO: 5474)
VRML,
(SEQ ID NO: 5475)
ARML,
(SEQ ID NO: 5476)
AKML,
(SEQ ID NO: 5477)
VKSL,
(SEQ ID NO: 5478)
VQML,
(SEQ ID NO: 5479)
TRSL,
(SEQ ID NO: 5480)
VRQL,
(SEQ ID NO: 5481)
AQML,
(SEQ ID NO: 5482)
VKYL,
(SEQ ID NO: 5483)
ARTI,
(SEQ ID NO: 5484)
AGAD,
(SEQ ID NO: 5485)
VQAL,
(SEQ ID NO: 5486)
VKTL,
(SEQ ID NO: 5487)
GVHL,
or
(SEQ ID NO: 5488)
AGHL;

[0642] (ii) an amino acid sequence comprising any portion of an amino acid sequence in (i), e.g., any 2 or 3 amino acids, e.g., consecutive amino acids, thereof;
[0643] (iii) an amino acid sequence comprising at least one, two, or three but no more than four modifications, e.g., substitutions (e.g., conservative substitutions), insertions, or deletions, relative to any of the amino acid sequences in (i); or
[0644] (iv) an amino acid sequence comprising at least one, two, or three but no more than four different amino acids, relative to any one of the amino acid sequences in (i).
[0645] 269. The AAV capsid variant of any one of embodiments 260 or 265-268, wherein [N2]-[N3] is or comprises:

(i)
(SEQ ID NO: 5489)
VKALY,
(SEQ ID NO: 5490)
ARMIY,
(SEQ ID NO: 5491)
VKMLY,
(SEQ ID NO: 5492)
VRALY,
(SEQ ID NO: 5493)
VRSLY,
(SEQ ID NO: 5494)
TRMLY,
(SEQ ID NO: 5495)
VRTLY,
(SEQ ID NO: 5496)
VRMLY,
(SEQ ID NO: 5497)
ARMLY,
(SEQ ID NO: 5498)
AKMLY,
(SEQ ID NO: 5499)
VKSLY,
(SEQ ID NO: 5500)
VQMLY,
(SEQ ID NO: 5501)
TRSLY,
(SEQ ID NO: 5502)
VRQLY,
(SEQ ID NO: 5503)
AQMLY,
(SEQ ID NO: 5504)
VKYLY,
(SEQ ID NO: 5505)
ARTIY,
(SEQ ID NO: 5506)
AGADY,
(SEQ ID NO: 5507)
VQALY,
(SEQ ID NO: 5508)
VKTLY,
(SEQ ID NO: 5509)
GVHLS,
or
(SEQ ID NO: 5510)
AGHLN;

[0646] (ii) an amino acid sequence comprising any portion of an amino acid sequence in (i), e.g., any 2, 3, or 4 amino acids, e.g., consecutive amino acids, thereof;
[0647] (iii) an amino acid sequence comprising at least one, two, or three but no more than four modifications, e.g., substitutions (e.g., conservative substitutions), insertions, or deletions, relative to any of the amino acid sequences in (i); or
[0648] (iv) an amino acid sequence comprising at least one, two, or three but no more than four different amino acids, relative to any one of the amino acid sequences in (i).
[0649] 270. The AAV capsid variant of any one of embodiments 265-269, wherein [N1]-[N2]-[N3] comprises:

(i)
(SEQ ID NO: 5511)
PLNGVKAL,
(SEQ ID NO: 5512)
PLNGARMI,
(SEQ ID NO: 5513)
PLNGVKML,
(SEQ ID NO: 5514)
PLNGVRAL,
(SEQ ID NO: 5515)
PLNGVRSL,
(SEQ ID NO: 5516)
PLNGTRML,
(SEQ ID NO: 5517)
PLNGVRTL,
(SEQ ID NO: 5518)
PLNGVRML,
(SEQ ID NO: 5519)
PLNGARML,
(SEQ ID NO: 5520)
PLNGAKML,
(SEQ ID NO: 5521)
PLNGVKSL,
(SEQ ID NO: 5522)
PLNGVQML,
(SEQ ID NO: 5523)
PLNGTRSL,
(SEQ ID NO: 5524)
PLNGVRQL,
(SEQ ID NO: 5525)
PLNGAQML,
(SEQ ID NO: 5526)
PLNGVKYL,
(SEQ ID NO: 5527)
PLNGARTI,
(SEQ ID NO: 5528)
PLNGAGAD,
(SEQ ID NO: 5529)
PLNGVQAL,
(SEQ ID NO: 5530)
PLNGVKTL,
(SEQ ID NO: 5531)
PLNGGVHL,
or
(SEQ ID NO: 5532)
PLNGAGHL;

[0650] (ii) an amino acid sequence comprising any portion of an amino acid sequence in (i), e.g., any 2, 3, 4, 5, 6, or 7 amino acids, e.g., consecutive amino acids, thereof;
[0651] (iii) an amino acid sequence comprising at least one, two, or three but no more than four modifications, e.g., substitutions (e.g., conservative substitutions), insertions, or deletions, relative to any of the amino acid sequences in (i); or
[0652] (iv) an amino acid sequence comprising at least one, two, or three but no more than four different amino acids, relative to any one of the amino acid sequences in (i).
[0653] 271. The AAV capsid variant of any one of embodiments 260 or 265-270, wherein [N1]-[N2]-[N3] is or comprises:

(i)
(SEQ ID NO: 5533)
PLNGVKALY,
(SEQ ID NO: 5534)
PLNGARMIY,
(SEQ ID NO: 5535)
PLNGVKMLY,
(SEQ ID NO: 5536)
PLNGVRALY,
(SEQ ID NO: 5537)
PLNGVRSLY,
(SEQ ID NO: 5538)
PLNGTRMLY,
(SEQ ID NO: 5539)
PLNGVRTLY,
(SEQ ID NO: 5540)
PLNGVRMLY,
(SEQ ID NO: 5541)
PLNGARMLY,
(SEQ ID NO: 5542)
PLNGAKMLY,
(SEQ ID NO: 5543)
PLNGVKSLY,
(SEQ ID NO: 5544)
PLNGVQMLY,
(SEQ ID NO: 5545)
PLNGTRSLY,
(SEQ ID NO: 5546)
PLNGVRQLY,
(SEQ ID NO: 5547)
PLNGAQMLY,
(SEQ ID NO: 5548)
PLNGVKYLY,
(SEQ ID NO: 5549)
PLNGARTIY,
(SEQ ID NO: 5550)
PLNGAGADY,
(SEQ ID NO: 5551)
PLNGVQALY,
(SEQ ID NO: 5552)
PLNGVKTLY,
(SEQ ID NO: 5553)
PLNGGVHLS,
or
(SEQ ID NO: 5554)
PLNGAGHLN;

[0654] (ii) an amino acid sequence comprising any portion of an amino acid sequence in (i), e.g., any 2, 3, 4, 5, 6, 7, or 8 amino acids, e.g., consecutive amino acids, thereof;
[0655] (iii) an amino acid sequence comprising at least one, two, or three but no more than four modifications, e.g., substitutions (e.g., conservative substitutions), insertions, or deletions, relative to any of the amino acid sequences in (i); or
[0656] (iv) an amino acid sequence comprising at least one, two, or three but no more than four different amino acids, relative to any one of the amino acid sequences in (i).
[0657] 272. The AAV capsid variant of any one of embodiments 260 or 265-271, wherein:
   [0658] (i) [N1] is or comprises: PLNG (SEQ ID NO: 3678);
   [0659] (ii) [N2] is or comprises: VKA, ARM, VKM, VRA, VRS, TRM, VRT, VRM, AKM, VKS, VQM, TRS, VRQ, AQM, VKY, ART, AGA, VQA, VKT, GVH, AGH; and/or
   [0660] (iii) [N3] is or comprises: LY, IY, DY, LS, or LN.
[0661] 273. The AAV capsid variant of any one of embodiments 259-272, wherein [N1], [N2], and/or [N3] is present in loop VIII of the AAV capsid variant.
[0662] 274. The AAV capsid variant of any one of embodiments 259-129, wherein [N1] is present immediately subsequent to position 586, numbered according to SEQ ID NO: 5, 8, 138, or 3636.
[0663] 275. The AAV capsid variant of any one of embodiments 259-274, wherein [N1] replaces positions 587 and 588 (e.g., A 587 and Q588), numbered according to SEQ ID NO: 138.
[0664] 276. The AAV capsid variant of any one of embodiments 259-275, wherein [N1] is present immediately subsequent to position 586 and replaces positions 587 and 588 (e.g., A 587 and Q588), numbered according to SEQ ID NO: 138.
[0665] 277. The AAV capsid variant of any one of embodiments 259-276, wherein [N1] corresponds to positions 587-590 of SEQ ID NO: 5, 8, or 3636.
[0666] 278. The AAV capsid variant of any one of embodiments 259-27, wherein [N2] is present immediately subsequent to [N1].
[0667] 279. The AAV capsid variant of any one of embodiments 259-278, wherein [N2] corresponds to positions 591-593 of SEQ ID NO: 5, 8, or 3636.
[0668] 280. AAV capsid variant of any one of embodiments 259-279, [N1]-[N2] is present immediately subsequent to position 586, numbered according to SEQ ID NO: 138.
[0669] 281. The AAV capsid variant of any one of embodiments 259-280, wherein [N1]-[N2] replaces positions 587 and 588 (e.g., A 587 and Q588), numbered according to SEQ ID NO: 138.
[0670] 282. The AAV capsid variant of any one of embodiments 259-281, wherein [N1]-[N2] is present immediately subsequent to position 586 and replaces positions 587 and 588 (e.g., A 587 and Q588), numbered according to SEQ ID NO: 138.
[0671] 283. The AAV capsid variant of any one of embodiments 259-282, wherein [N1]-[N2] corresponds to positions 587-593 of SEQ ID NO: 5, 8, or 3636.
[0672] 284. The AAV capsid variants of any one of embodiments 260 or 265-283, wherein [N3] is present immediately subsequent to [N2].
[0673] 285. The AAV capsid variants of any one of embodiments 260 or 265-284, wherein [N3] corresponds to positions 594 and 595 of SEQ ID NO: 5, 8, or 3636.
[0674] 286. The AAV capsid variants of any one of embodiments 260 or 265-285, wherein [N2]-[N3] is present immediately subsequent to [N1].
[0675] 287. The AAV capsid variants of any one of embodiments 260 or 265-286, wherein [N1]-[N2]-[N3] is present immediately subsequent to position 586, numbered according to SEQ ID NO: 138.
[0676] 288. The AAV capsid variants of any one of embodiments 260 or 265-287, wherein [N1]-[N2]-[N3] replaces positions 587 and 588 (e.g., A 587 and Q588), numbered according to SEQ ID NO: 138.
[0677] 289. The AAV capsid variants of any one of embodiments 260 or 265-288, wherein [N1]-[N2]-[N3] is present immediately subsequent to position 586 and replaces positions 587 and 588 (e.g., A 587 and Q588), numbered according to SEQ ID NO: 138.
[0678] 290. The AAV capsid variants of any one of embodiments 260 or 265-289, wherein [N1]-[N2]-[N3] corresponds to positions 587-595 of SEQ ID NO: 5, 8, or 3636.
[0679] 291. An AAV capsid variant, comprising an amino sequence comprising the following formula: [B]-[C], wherein:
   [0680] (i) [B] comprises X1, X2, and X3, wherein:
      [0681] (a) position X1 is: P, V, A, or T;
      [0682] (b) position X2 is: G, K, R, Q, or V; and
      [0683] (c) position X3 is: H, A, M, S, T, Q, or Y; and
   [0684] (ii) [C] comprises the amino acid sequence of LY.
[0685] 292. An AAV capsid variant comprising one, two, or all of:
   [0686] (i) an [A], wherein [A] is or comprises: PLNN (SEQ ID NO: 4752), PLNG (SEQ ID NO: 3678), PSAR (SEQ ID NO: 4753), PLNM (SEQ ID NO: 4755), SLNG (SEQ ID NO: 4756), SING (SEQ ID NO: 4757), PLNL (SEQ ID NO: 4759), or PGRQ (SEQ ID NO: 4760);
   [0687] (ii) a [B], wherein [B] is or comprises: PGH, VKA, VKM, VRA, VRS, TRM, VRT, VRM, ARM, AKM, VKS, VQM, AVH, TRS, VRQ, AQM, VKY, VQA, VKT, PVH, VGH, or TGH; and/or
   [0688] (iii) a [C] wherein [C] is or comprises: LY.
[0689] 293. The AAV capsid variant of embodiment 291, wherein [B] comprises PG, VK, VR, TR, AR, AK, VQ, AV, AQ, PV, VG, TG, GH, KA, KM, RA, RS, RM, RT, KS, QM, VH, RQ, KY, QA, or KT.
[0690] 294. The AAV capsid variant of any one of embodiments 291-293, wherein [B] is or comprises PGH, VKA, VKM, VRA, VRS, TRM, VRT, VRM, ARM, AKM, VKS, VQM, AVH, TRS, VRQ, AQM, VKY, VQA, VKT, PVH, VGH, or TGH.
[0691] 295. The AAV capsid variant of any one of embodiments 291, 293, or 294, wherein [B]-[C] comprises:

(i)
(SEQ ID NO: 4734)
GHLY,
(SEQ ID NO: 5555)
KALY,
(SEQ ID NO: 5556)
KMLY,
(SEQ ID NO: 5557)
RALY,
(SEQ ID NO: 5558)
RSLY,
(SEQ ID NO: 5559)
RMLY,
(SEQ ID NO: 5560)
RTLY,
(SEQ ID NO: 5559)
RMLY,
(SEQ ID NO: 5559)
RMLY,
(SEQ ID NO: 5556)
KMLY,
(SEQ ID NO: 5561)
KSLY,
(SEQ ID NO: 5562)
QMLY,
(SEQ ID NO: 4680)
VHLY,
(SEQ ID NO: 5558)
RSLY,
(SEQ ID NO: 5563)
RQLY,
(SEQ ID NO: 5562)
QMLY,
(SEQ ID NO: 5564)
KYLY,
(SEQ ID NO: 4734)
GHLY,
(SEQ ID NO: 5565)
QALY,
(SEQ ID NO: 4680)
VHLY,
(SEQ ID NO: 5566)
KTLY,
(SEQ ID NO: 4680)
VHLY,
(SEQ ID NO: 4734)
GHLY,
(SEQ ID NO: 4734)
GHLY,
or
(SEQ ID NO: 4680)
VHLY;

[0692] (ii) an amino acid sequence comprising any portion of an amino acid sequence in (i, e.g., any 2, or 3 amino acids, e.g., consecutive amino acids, thereof;
[0693] (iii) an amino acid sequence comprising at least one, two, or three but no more than four modifications, e.g., substitutions (e.g., conservative substitutions), insertions, or deletions, relative to any of the amino acid sequences in (i); or
[0694] (iv) an amino acid sequence comprising at least one, two, or three but no more than four different amino acids, relative to any one of the amino acid sequences in (i).
[0695] 296. The AAV capsid variant of any one of embodiments 291-295, wherein [B]-[C] is or comprises:

(i)
(SEQ ID NO: 5567)
PGHLY,
(SEQ ID NO: 5489)
VKALY,
(SEQ ID NO: 5491)
VKMLY,
(SEQ ID NO: 5492)
VRALY,
(SEQ ID NO: 5493)
VRSLY,
(SEQ ID NO: 5494)
TRMLY,
(SEQ ID NO: 5495)
VRTLY,
(SEQ ID NO: 5496)
VRMLY,
(SEQ ID NO: 5497)
ARMLY,
(SEQ ID NO: 5498)
AKMLY,
(SEQ ID NO: 5499)
VKSLY,
(SEQ ID NO: 5500)
VQMLY,
(SEQ ID NO: 3687)
AVHLY,
(SEQ ID NO: 5501)
TRSLY,
(SEQ ID NO: 5502)
VRQLY,
(SEQ ID NO: 5503)
AQMLY,
(SEQ ID NO: 5504)
VKYLY,
(SEQ ID NO: 5507)
VQALY,
(SEQ ID NO: 5508)
VKTLY,
(SEQ ID NO: 5568)
PVHLY,
(SEQ ID NO: 5569)
VGHLY,
or
(SEQ ID NO: 5570)
TGHLY;

[0696] (ii) an amino acid sequence comprising any portion of an amino acid sequence in (i), e.g., any 2, or 3 amino acids, e.g., consecutive amino acids, thereof;
[0697] (iii) an amino acid sequence comprising at least one, two, or three but no more than four modifications, e.g., substitutions (e.g., conservative substitutions), insertions, or deletions, relative to any of the amino acid sequences in (i); or
[0698] (iv) an amino acid sequence comprising at least one, two, or three but no more than four different amino acids, relative to any one of the amino acid sequences in (i).
[0699] 297. The AAV capsid of any one of embodiments 291-296, which further comprises [A], wherein [A] comprises X4, X5, X6, and X7, wherein:
   [0700] (a) position X4 is P or S;
   [0701] (b) position X5 is L, S, I, or G;
   [0702] (c) position X6 is N, A, or R; and
   [0703] (d) position X7 is N, G, R, M, L, or Q.
[0704] 298. The AAV capsid variant of embodiment 297, wherein [A] comprises PL, PS, SL, SI, PG, NN, NG, AR, NM, NL, RQ, LN, SA, IN, or GR.
[0705] 299. The AAV capsid variant of embodiment 297 or 298, wherein [A] comprises PLN, PSA, SLN, SIN, PGR, LNN, LNG, SAR, LNM, ING, LNL, or GRQ.
[0706] 300. The AAV capsid variant of embodiment 292 or 297-298, wherein [A] is or comprises PLNN (SEQ ID NO: 4752), PLNG (SEQ ID NO: 3678), PSAR (SEQ ID NO: 4753), PLNM (SEQ ID NO: 4755), SLNG (SEQ ID NO: 4756), SING (SEQ ID NO: 4757), PLNL (SEQ ID NO: 4759), or PGRQ (SEQ ID NO: 4760).
[0707] 301. The AAV capsid variant of embodiment 297-300, wherein [A]-[B]-[C] comprises:

(i)
(SEQ ID NO: 5571)
NNPGHLY,
(SEQ ID NO: 5572)
NGVKALY,
(SEQ ID NO: 5573)
NGVKMLY,
(SEQ ID NO: 5574)
NGVRALY,
(SEQ ID NO: 5575)
NGVRSLY,
(SEQ ID NO: 5576)
NGTRMLY,
(SEQ ID NO: 5577)
NGVRTLY,
(SEQ ID NO: 5578)
NGVRMLY,
(SEQ ID NO: 5579)
NGARMLY,
(SEQ ID NO: 5580)
NGAKMLY,
(SEQ ID NO: 5581)
NGVKSLY,
(SEQ ID NO: 5582)
NGVQMLY,
(SEQ ID NO: 5583)
ARAVHLY,
(SEQ ID NO: 5584)
NGTRSLY,
(SEQ ID NO: 5585)
NGVRQLY,
(SEQ ID NO: 5586)
NGAQMLY,
(SEQ ID NO: 5587)
NGVKYLY,
(SEQ ID NO: 5588)
NMPGHLY,
(SEQ ID NO: 5589)
NGVQALY,
(SEQ ID NO: 3689)
NGAVHLY,
(SEQ ID NO: 5590)
NGVKTLY,
(SEQ ID NO: 5591)
NGPVHLY,
(SEQ ID NO: 5592)
NLVGHLY,
(SEQ ID NO: 5593)
NLTGHLY,
or
(SEQ ID NO: 5594)
RQAVHLY;

[0708] (ii) an amino acid sequence comprising any portion of an amino acid sequence in (i), e.g., any 2, 3, 4, 5, or 6 amino acids, e.g., consecutive amino acids, thereof;
[0709] (iii) an amino acid sequence comprising at least one, two, or three but no more than four modifications, e.g., substitutions (e.g., conservative substitutions), insertions, or deletions, relative to any of the amino acid sequences in (i); or
[0710] (iv) an amino acid sequence comprising at least one, two, or three but no more than four different amino acids, relative to any one of the amino acid sequences in (i).
[0711] 302. The AAV capsid variant of embodiment 292 or 297-301, wherein [A]-[B]-[C] is or comprises:

(i)
(SEQ ID NO: 5595)
PLNNPGHLY,
(SEQ ID NO: 5533)
PLNGVKALY,
(SEQ ID NO: 5535)
PLNGVKMLY,
(SEQ ID NO: 5536)
PLNGVRALY,
(SEQ ID NO: 5537)
PLNGVRSLY,
(SEQ ID NO: 5538)
PLNGTRMLY,
(SEQ ID NO: 5539)
PLNGVRTLY,
(SEQ ID NO: 5540)
PLNGVRMLY,
(SEQ ID NO: 5541)
PLNGARMLY,
(SEQ ID NO: 5542)
PLNGAKMLY,
(SEQ ID NO: 5543)
PLNGVKSLY,
(SEQ ID NO: 5544)
PLNGVQMLY,
(SEQ ID NO: 5596)
PSARAVHLY,
(SEQ ID NO: 5545)
PLNGTRSLY,
(SEQ ID NO: 5546)
PLNGVRQLY,
(SEQ ID NO: 5547)
PLNGAQMLY,
(SEQ ID NO: 5548)
PLNGVKYLY,
(SEQ ID NO: 5597)
PLNMPGHLY,
(SEQ ID NO: 5551)
PLNGVQALY,
(SEQ ID NO: 4792)
SLNGAVHLY,
(SEQ ID NO: 5552)
PLNGVKTLY,
(SEQ ID NO: 5598)
SINGPVHLY,
(SEQ ID NO: 5599)
PLNLVGHLY,
(SEQ ID NO: 5600)
PLNLTGHLY,
or
(SEQ ID NO: 5601)
PGRQAVHLY;

[0712] (ii) an amino acid sequence comprising any portion of an amino acid sequence in (i), e.g., any 2, 3, 4, 5, 6, 7, or 8 amino acids, e.g., consecutive amino acids, thereof;
[0713] (iii) an amino acid sequence comprising at least one, two, or three but no more than four modifications, e.g., substitutions (e.g., conservative substitutions), insertions, or deletions, relative to any of the amino acid sequences in (i); or
[0714] (iv) an amino acid sequence comprising at least one, two, or three but no more than four different amino acids, relative to any one of the amino acid sequences in (i).
[0715] 303. The AAV capsid variant of any one of embodiments 292 or 297-302, wherein [A], [B], and/or [C] is present in loop VIII of the AAV capsid variant.
[0716] 304. The AAV capsid variant of any one of embodiments 292 or 297-303, wherein [A] is present immediately subsequent to position 586, numbered according to SEQ ID NO: 5, 8, 138, or 3636.
[0717] 305. The AAV capsid variant of any one of embodiments 292 or 297-304, wherein [A] replaces positions 587 and 588 (e.g., A 587 and Q588), numbered according to SEQ ID NO: 138.
[0718] 306. The AAV capsid variant of any one of embodiments 292 or 297-305, wherein [A] is present immediately subsequent to position 586 and replaces positions 587 and 588 (e.g., A 587 and Q588), numbered according to SEQ ID NO: 138.
[0719] 307. The AAV capsid variant of any one of embodiments 292 or 297-129, wherein [A] corresponds to positions 587-590 of SEQ ID NO: 5, 8, or 3636.
[0720] 308. The AAV capsid variant of any one of embodiments 292 or 297-307, wherein [B] is present immediately subsequent to [A].
[0721] 309. The AAV capsid variant of any one of embodiments 291-308, wherein [B] corresponds to positions 591-593 of SEQ ID NO: 5, 8, or 3636.
[0722] 310. AAV capsid variant of any one of embodiments 292 or 297-309, [A]-[B] is present immediately subsequent to position 586, numbered according to SEQ ID NO: 138.
[0723] 311. The AAV capsid variant of any one of embodiments 292 or 297-310, wherein [A]-[B] replaces positions 587 and 588 (e.g., A 587 and Q588), numbered according to SEQ ID NO: 138.
[0724] 312. The AAV capsid variant of any one of embodiments 292 or 297-311, wherein [A]-[B] is present immediately subsequent to position 586 and replaces positions 587 and 588 (e.g., A 587 and Q588), numbered according to SEQ ID NO: 138.
[0725] 313. The AAV capsid variant of any one of embodiments 292 or 297-312, wherein [A]-[B] corresponds to positions 587-593 of SEQ ID NO: 5, 8, or 3636.
[0726] 314. The AAV capsid variants of any one of embodiments 291-313, wherein [C] is present immediately subsequent to [B].
[0727] 315. The AAV capsid variants of any one of embodiments 291-314, wherein [C] corresponds to positions 594 and 595 of SEQ ID NO: 5, 8, or 3636.
[0728] 316. The AAV capsid variants of any one of embodiments 292 or 297-315, wherein [B]-[C] is present immediately subsequent to [A].
[0729] 317. The AAV capsid variants of any one of embodiments 292 or 297-318, wherein [A]-[B]-[C] is present immediately subsequent to position 586, numbered according to SEQ ID NO: 138.
[0730] 318. The AAV capsid variants of any one of embodiments 292 or 297-319, wherein [A]-[B]-[C] replaces positions 587 and 588 (e.g., A 587 and Q588), numbered according to SEQ ID NO: 138.
[0731] 319. The AAV capsid variants of any one of embodiments 292 or 297-320, wherein [A]-[B]-[C] is present immediately subsequent to position 586 and replaces positions 587 and 588 (e.g., A 587 and Q588), numbered according to SEQ ID NO: 138.
[0732] 320. The AAV capsid variants of any one of embodiments 292 or 297-321, wherein [A]-[B]-[C] corresponds to positions 587-595 of SEQ ID NO: 5, 8, or 3636.
[0733] 321. An AAV capsid variant comprising an amino acid sequence comprising positions X1-X2-X3-X4-X5-X6-X7-X8-X9, wherein:
   [0734] (i) X1 is: P, T, S, A, or L;
   [0735] (ii) X2 is: L, S, I, G, or V;
   [0736] (iii) X3 is: N, A, or R;
   [0737] (iv) X4 is: N, G, R, M, L, Q, or S;
   [0738] (v) X5 is: P, V, A, T, or G;
   [0739] (vi) X6 is: G, K, R, Q, or V;
   [0740] (vii) X7 is: H, A, M, S, T, Q, Y, or R;
   [0741] (viii) X8 is: L, I, D, or V; and
   [0742] (ix) X9 is: Y, N, or S.
[0743] 322. The AAV capsid variant of embodiment 321, wherein X1-X2-X3-X4-X5-X6-X7-X8-X9 is present immediately subsequent to position 586, numbered according to SEQ ID NO: 5, 8, 138, or 3636.
[0744] 323. The AAV capsid variant of embodiment 321 or 322, wherein X1-X2-X3-X4-X5-X6-X7-X8-X9 replaces positions 587 and 588 (e.g., A 587 and Q588), numbered according to SEQ ID NO: 138.
[0745] 324. The AAV capsid variant of any one of embodiments 321-232, wherein X1-X2-X3-X4-X5-X6-X7-X8-X9 is present immediately subsequent to position 586 and replaces positions 587 and 588 (e.g., A 587 and Q588), numbered according to SEQ ID NO: 138.
[0746] 325. The AAV capsid variant of any one of embodiments 321-324, wherein X1-X2-X3-X4-X5-X6-X7-X8-X9 corresponds to positions 587-595 of SEQ ID NO: 5, 8, or 3636.
[0747] 326. The AAV capsid variant of any one of embodiments 259-290, which further comprises an amino acid other than A at position 589 (e.g., V) or an amino acid other than G at position 594 (e.g., R), relative to a reference sequence numbered according to the amino acid sequence of SEQ ID NO: 138.
[0748] 327. The AAV capsid variant of any one of embodiments 291-320, which further comprises an amino acid other than A at position 589 (e.g., V) or an amino acid other than W at position 595 (e.g., S), relative to a reference sequence numbered according to the amino acid sequence of SEQ ID NO: 138.
[0749] 328. The AAV capsid variant of any one of embodiments 321-325, which further comprises an amino acid other than A at position 589 (e.g., V), an amino acid other than A at position 591 (e.g., G or V), an amino acid other than T at position 593 (e.g., A), an amino acid other than G at position 594 (e.g., R), or an amino acid other than W at position 595 (e.g., S), relative to a reference sequence numbered according to the amino acid sequence of SEQ ID NO: 138.
[0750] 329. The AAV capsid variant of any one of embodiments 259-328, which further comprises the amino acid V at position 589, relative to a reference sequence numbered according to the amino acid sequence of SEQ ID NO: 138.
[0751] 330. The AAV capsid variant of any one of embodiments 321, 328, or 329, which further comprises:
   [0752] (i) the amino acid G at position 591, relative to a reference sequence numbered according to the amino acid sequence of SEQ ID NO: 138; or
   [0753] (ii) the amino acid V at position 591, relative to a reference sequence numbered according to the amino acid sequence of SEQ ID NO: 138.
[0754] 331. The AAV capsid variant of any one of embodiments 321, or 328-330, which further comprises the amino acid A position 593, relative to a reference sequence numbered according to the amino acid sequence of SEQ ID NO: 138.
[0755] 332. The AAV capsid variant of any one of embodiments 259-290, 321-326, or 328-331, which further comprises the amino acid R at position 594, relative to a reference sequence numbered according to the amino acid sequence of SEQ ID NO: 138.
[0756] 333. The AAV capsid variant of any one of embodiments 291-326, 327-329, which further comprises the amino acid S at position 595, relative to a reference sequence numbered according to the amino acid sequence of SEQ ID NO: 138.
[0757] 334. The AAV capsid variant of any one of embodiments 259-290, 326, 329, or 332, wherein the amino acid sequence comprises:
   [0758] (i) the amino acid sequence of any of SEQ ID NOs: 1140-1151, 1153-1157, 1159, 1161, 1163, 1166, 1167;
   [0759] (ii) an amino acid sequence comprising any portion of an amino acid sequence in (i), e.g., any 2, 3, 4, 5, 6, 7, 8, 9, 10, 11, 12, 13, 14, or 15 amino acids, e.g., consecutive amino acids, thereof;
   [0760] (iii) an amino acid sequence comprising at least one, two, or three but no more than four modifications, e.g., substitutions (e.g., conservative substitutions), insertions, or deletions, relative to any of the amino acid sequences in (i); or
   [0761] (iv) an amino acid sequence comprising at least one, two, or three but no more than four different amino acids, relative to any one of the amino acid sequences in (i).
[0762] 335. The AAV capsid variant of any one of embodiments 291-325, 327, 329, or 333, wherein the amino acid sequence comprises:
   [0763] (i) the amino acid sequence of any of SEQ ID NOs: 1139, 1140, 1142-1155, 1156, 1160, 1161-1163, 1165, or 1169-1171;
   [0764] (ii) an amino acid sequence comprising any portion of an amino acid sequence in (i), e.g., any 2, 3, 4, 5, 6, 7, 8, 9, 10, 11, 12, 13, 14, or 15 amino acids, e.g., consecutive amino acids, thereof;
   [0765] (iii) an amino acid sequence comprising at least one, two, or three but no more than four modifications, e.g., substitutions (e.g., conservative substitutions), insertions, or deletions, relative to any of the amino acid sequences in (i); or
   [0766] (iv) an amino acid sequence comprising at least one, two, or three but no more than four different amino acids, relative to any one of the amino acid sequences in (i).
[0767] 336. The AAV capsid variant of embodiment 321, or 328-333, wherein the amino acid sequence comprises:
   [0768] (i) the amino acid sequence of any of SEQ ID NOs: 1139-1172;
   [0769] (ii) an amino acid sequence comprising any portion of an amino acid sequence in (i), e.g., any 2, 3, 4, 5, 6, 7, 8, 9, 10, 11, 12, 13, 14, or 15 amino acids, e.g., consecutive amino acids, thereof;
   [0770] (iii) an amino acid sequence comprising at least one, two, or three but no more than four modifications, e.g., substitutions (e.g., conservative substitutions), insertions, or deletions, relative to any of the amino acid sequences in (i); or
   [0771] (iv) an amino acid sequence comprising at least one, two, or three but no more than four different amino acids, relative to any one of the amino acid sequences in (i).
[0772] 337. An AAV capsid variant comprising:
   [0773] (a) the amino acid sequence of any one of the sequences provided in Tables 1A, 1B, 10, or 20;
   [0774] (b) an amino acid sequence comprising at least 3, 4, 5, 6, 7, 8, 9, 10, 11, 12, 13, 14, 15, 16, 17, or 18 consecutive amino acids from any one of the sequences provided in Tables 1A, 1B, 10, or 20; or
   [0775] (c) an amino acid sequence comprising at least one, two, or three but no more than four different amino acids, relative to any one of the amino acid sequences provided in Tables 1A, 1B, 10, or 20; or
   [0776] (d) an amino acid sequence comprising at least one, two, or three but no more than four modifications, e.g., substitutions (e.g., conservative substitutions), insertions, or deletions, relative to the amino acid sequence of any one of the sequences provided in Tables 1A, 1B, 10, or 20;
   [0777] optionally wherein the AAV capsid variant does not comprise the amino acid sequence of TGW at positions 593-595, relative to a reference sequence numbered according to the amino acid sequence of SEQ ID NO: 138.
[0778] 338. An AAV capsid variant comprising:
   [0779] (a) the amino acid sequence of any one of SEQ ID NOs: 139-1138;
   [0780] (b) an amino acid sequence comprising at least 3, 4, 5, 6, 7, 8, 9, 10, 11, 12, 13, 14, 15, 16, 17, or 18 consecutive amino acids from any one of SEQ ID NOs: 139-1138; or
   [0781] (c) an amino acid sequence comprising at least one, two, or three but no more than four different amino acids, relative to the amino acid sequence of any one of SEQ ID NOs: 139-1138;
   [0782] (d) an amino sequence comprising at least one, two, or three but no more than four modifications, e.g., substitutions (e.g., conservative substitutions), insertions, or deletions, relative to the amino acid sequence of any one of SEQ ID NOs: 139-1138;
   [0783] optionally wherein the AAV capsid variant does not comprise the amino acid sequence of TGW at positions 593-595, relative to a reference sequence numbered according to the amino acid sequence of SEQ ID NO: 138.
[0784] 339. An AAV capsid variant comprising:
   [0785] (a) the amino acid sequence of any one of SEQ ID NOs: 139-476;
   [0786] (b) an amino acid sequence comprising at least 3, 4, 5, 6, 7, 8, 9, 10, 11, 12, 13, 14, 15, 16, 17, or 18 consecutive amino acids from any one of SEQ ID NOs: 139-476; or
   [0787] (c) an amino acid sequence comprising at least one, two, or three but no more than four different amino acids, relative to the amino acid sequence of any one of SEQ ID NOs: 139-476;
   [0788] (d) an amino sequence comprising at least one, two, or three but no more than four modifications, e.g., substitutions (e.g., conservative substitutions), insertions, or deletions, relative to the amino acid sequence of any one of SEQ ID NOs: 139-476;
   [0789] optionally wherein the AAV capsid variant does not comprise the amino acid sequence of TGW at positions 593-595, relative to a reference sequence numbered according to the amino acid sequence of SEQ ID NO: 138.
[0790] 340. An AAV capsid variant comprising:
   [0791] (a) the amino acid sequence of any one of the amino acid sequences provided in Table 1B;
   [0792] (b) an amino acid sequence comprising at least 3, 4, 5, 6, 7, 8, 9, 10, 11, 12, 13, 14, 15, 16, 17, or 18 consecutive amino acids from any one of the amino acid sequences provided in Table 1B; or
   [0793] (c) an amino acid sequence comprising at least one, two, or three but no more than four different amino acids, relative to the amino acid sequence of any one of the amino acid sequences provided in Table 1B;
   [0794] (d) an amino sequence comprising at least one, two, or three but no more than four modifications, e.g., substitutions (e.g., conservative substitutions), insertions, or deletions, relative to the amino acid sequence of any one of the amino acid sequences provided in Table 1B;
   [0795] optionally wherein the AAV capsid variant does not comprise the amino acid sequence of TGW at positions 593-595, relative to a reference sequence numbered according to the amino acid sequence of SEQ ID NO: 138.
[0796] 341. The AAV capsid variant of embodiment 337 or 338, comprising an amino acid sequence comprising at least 4, 5, 6, 7, 8, 9, 10, 11, 12, 13, 14, 15, 16, 17, or 18 consecutive amino acids from any one of SEQ ID NOs: 139-1138.
[0797] 342. The AAV capsid variant of any one of embodiments 337-341, comprising an amino acid sequence comprising at least 4, 5, 6, 7, 8, 9, 10, 11, 12, 13, 14, 15, 16, 17, or 18 consecutive amino acids from SEQ ID NO: 314.
[0798] 343. The AAV capsid variant of any one of embodiments 337-341, comprising an amino acid sequence comprising at least 4, 5, 6, 7, 8, 9, 10, 11, 12, 13, 14, 15, 16, 17, or 18 consecutive amino acids from SEQ ID NO: 566.
[0799] 344. The AAV capsid variant of any one of embodiments 337-339, or 340, comprising an amino acid sequence comprising at least 4, 5, 6, 7, 8, 9, 10, 11, 12, 13, 14, 15, 16, 17, or 18 consecutive amino acids from any one of SEQ ID NOs: 139-476.
[0800] 345. The AAV capsid variant of embodiment 337 or 338, comprising an amino acid sequence comprising at least 4, 5, 6, 7, 8, 9, 10, 11, 12, 13, 14, 15, 16, 17, or 18 consecutive amino acids from any one of the sequences provided in Table 1B.
[0801] 346. The AAV capsid variant of embodiment 337 or 338, which comprises an amino acid sequence comprising at least one, two, or three but no more than four different amino acids relative to the amino acid sequence of any one of SEQ ID NOs: 139-1138.
[0802] 347. The AAV capsid variant of any one of embodiments 337-339, which comprises an amino acid sequence comprising at least one, two, or three but no more than four different amino acids relative to the amino acid sequence of any one of SEQ ID NOs: 139-476.
[0803] 348. The AAV capsid variant of embodiment 337 or 338, which comprises an amino acid sequence comprising at least one, two, or three but no more than four different amino acids relative to the amino acid sequence of any one of the amino acid sequences provided in Table 1B.
[0804] 349. The AAV capsid variant of any one of embodiments 337, 338, or 346, which comprises an amino acid sequence comprising at least one, two, or three but no more than four modifications, e.g., substitutions (e.g., conservative substitutions), insertions, or deletions, relative to the amino acid sequence of SEQ ID NOs: 139-1138.
[0805] 350. The AAV capsid variant of any one of embodiments 337, 338, 346, or 349, which comprises:
   [0806] (i) an amino acid sequence comprising at least one, two, or three but no more than four different amino acids relative to the amino acid sequence of SEQ ID NO: 314; or
   [0807] (ii) an amino acid sequence comprising at least one, two, or three but no more than four modifications, e.g., substitutions (e.g., conservative substitutions), insertions, or deletions, relative to SEQ ID NO: 314.
[0808] 351. The AAV capsid variant of any one of embodiments 337, 338, 346, or 349, which comprises:
   [0809] (i) an amino acid sequence comprising at least one, two, or three but no more than four different amino acids relative to the amino acid sequence of SEQ ID NO: 566; or
   [0810] (ii) an amino acid sequence comprising at least one, two, or three but no more than four modifications, e.g., substitutions (e.g., conservative substitutions), insertions, or deletions, relative to SEQ ID NO: 566.
[0811] 352. The AAV capsid variant of any one of embodiments 337-339 or 347, which comprises an amino acid sequence comprising at least one, two, or three but no more than four modifications, e.g., substitutions (e.g., conservative substitutions), insertions, or deletions, relative to the amino acid sequence of SEQ ID NOs: 139-476.
[0812] 353. The AAV capsid variant of any one of embodiments 337, 340, or 348, which comprises an amino acid sequence comprising at least one, two, or three but no more than four modifications, e.g., substitutions (e.g., conservative substitutions), insertions, or deletions, relative to any of the amino acid sequences provided in Table 1B.
[0813] 354. The AAV capsid variant of any one of embodiments 337-353, wherein 4, 5, 6, 7, 8, or 9 consecutive amino acids is not PLNG (SEQ ID NO: 3678), PLNGA (SEQ ID NO: 3679), PLNGAV (SEQ ID NO: 3680), PLNGAVHL (SEQ ID NO: 3682), and/or PLNGAVHLY (SEQ ID NO: 3648).
[0814] 355. The AAV capsid variant of embodiment 337, 338, 341-343, 346, 349, or 354, which comprises the amino acid sequence of any one of SEQ ID NOs: 139-1138.
[0815] 356. The AAV capsid variant of embodiment 337, 338, 341, 342, 346, 349, or 354, which comprises the amino acid sequence of SEQ ID NO: 314.
[0816] 357. The AAV capsid variant of embodiment 337, 338, 341, 343, 346, 349, or 354, which comprises the amino acid sequence of SEQ ID NO: 566.
[0817] 358. The AAV capsid variant of embodiment 337-339, 344, 347, 352, or 354, which comprises the amino acid sequence of any one of SEQ ID NOs: 139-476.
[0818] 359. The AAV capsid variant of embodiment 337, 340, 345, 348, 353, or 354, which comprises the amino acid sequence of any one of the amino acid sequences provided in Table 1B.
[0819] 360. An AAV capsid variant comprising:
   [0820] (a) the amino acid sequence of any one of SEQ ID NOs: 1139-1172;
   [0821] (b) an amino acid sequence comprising at least 3, 4, 5, 6, 7, 8, 9, 10, 11, 12, 13, 14, or 15 consecutive amino acids from any one of SEQ ID NOs: 1139-1172; or
   [0822] (c) an amino acid sequence comprising at least one, two, or three but no more than four different amino acids, relative to the amino acid sequence of any one of SEQ ID NOs: 1139-1172;
   [0823] (d) an amino sequence comprising at least one, two, or three but no more than four modifications, e.g., substitutions (e.g., conservative substitutions), insertions, or deletions, relative to the amino acid sequence of any one of SEQ ID NOs: 1139-1172.
[0824] 361. The AAV capsid variant of any one of embodiments 337-360, wherein the amino acid sequence is present in loop VIII.
[0825] 362. The AAV capsid variant of any one of embodiments 337-361, wherein the amino acid sequence is present immediately subsequent to position 586, 587, 588, 589, 590, 591, 592, 593, 594, or 595, relative to a reference sequence numbered according to the amino acid sequence of SEQ ID NO: 138.
[0826] 363. The AAV capsid variant of any one of embodiments 337-362, wherein the amino acid sequence is present immediately subsequent to position 586, relative to a reference sequence numbered according to the amino acid sequence of SEQ ID NO: 138.
[0827] 364. The AAV capsid variant of any one of embodiments 337-363, wherein the amino acid sequence replaces positions 587 and 588 (e.g., A587 and Q588), numbered according to SEQ ID NO: 138.
[0828] 365. The AAV capsid variant of any one of embodiments 337-362, wherein the amino acid sequence is present immediately subsequent to position 588, relative to a reference sequence numbered according to the amino acid sequence of SEQ ID NO: 138.
[0829] 366. The AAV capsid variant of any one of embodiments 337-362, wherein the amino acid sequence is present immediately subsequent to position 592, relative to a reference sequence numbered according to the amino acid sequence of SEQ ID NO: 138.
[0830] 367. The AAV capsid variant of any one of embodiments 337-362, wherein the amino acid sequence is present immediately subsequent to position 595, relative to a reference sequence numbered according to the amino acid sequence of SEQ ID NO: 138.
[0831] 368. The AAV capsid variant of any one of embodiments 1-367, which further comprises an amino acid other than A at position 587 and an amino acid other than Q at position 588, relative to a reference sequence numbered according to the amino acid sequence of SEQ ID NO: 138.
[0832] 369. The AAV capsid variant of any one of embodiments 337-368, which further comprises:
   [0833] (i) one, two, three, or all of an amino acid other than A at position 589, an amino acid other than Q at position 590, an amino acid other than A at position 591, and/or an amino acid other than Q at position 592, relative to a reference sequence numbered according to the amino acid sequence of SEQ ID NO: 138;
   [0834] (ii) one, two, or all of an amino acid other than T at position 593, an amino acid other than G at position 594, and/or an amino acid other than W at position 595, relative to a reference sequence numbered according to the amino acid sequence of SEQ ID NO: 138; and/or
   [0835] (iii) one, two, or all of an amino acid other than V at position 596, an amino acid other than Q at position 597, and/or an amino acid other than N at position 598, relative to a reference sequence numbered according to the amino acid sequence of SEQ ID NO: 138.
[0836] 370. The AAV capsid variant of any one of embodiments 337-369, which comprises the amino acid P at position 587 the amino acid L at position 588, and the amino acid sequence NGAVHLY (SEQ ID NO: 3689), which is present immediately subsequent to position 588, corresponding to or numbered according to SEQ ID NO: 5, 8, 138, or 3636.
[0837] 371. An AAV capsid variant comprising the amino acid P at position 587 the amino acid L at position 588, and the amino acid sequence NGAVHLY (SEQ ID NO: 3689) present immediately subsequent to position 588, corresponding to or numbered according to SEQ ID NO: 5, 8, 138, or 3636.
[0838] 372. The AAV capsid variant of any one of embodiments 337-371, which further comprises:
   [0839] (i) one, two, or all of an amino acid other than T at position 593, an amino acid other than G at position 594, and/or an amino acid other than W at position 595, numbered according to the amino acid sequence of SEQ ID NO: 138; or
   [0840] (ii) one, two, or all of an amino acid other than T at position 600, an amino acid other than G at position 601, and/or an amino acid other than W at position 602, numbered according to the amino acid sequence of SEQ ID NO: 5, 8, or 3636.
[0841] 373. The AAV capsid variant of any one of embodiments 337-372, which further comprises:
   [0842] (i) an amino acid other than T at position 593, an amino acid other than G at position 594, and an amino acid other than W at position 595, numbered according to the amino acid sequence of SEQ ID NO: 138;
   [0843] (ii) an amino acid other than T at position 600, an amino acid other than G at position 601, and an amino acid other than W at position 602, numbered according to the amino acid sequence of SEQ ID NO: 5, 8, 3636.
[0844] 374. The AAV capsid variant of any one of embodiments 337-373, which further comprises:
   [0845] (i) one, two, or all of the amino acid L at position 593, the amino acid S at position 594, and/or the amino acid P at position 595, numbered according to the amino acid sequence of SEQ ID NO: 138; or
   [0846] (ii) one, two, or all of the amino acid L at position 600, the amino acid S at position 601, and/or the amino acid P at position 602, numbered according to the amino acid sequence of SEQ ID NO: 5, 8, or 3636.
[0847] 375. The AAV capsid variant of any one of embodiments 337-374, which further comprises:
   [0848] (i) the amino acid L at position 593, the amino acid S at position 594, and the amino acid P at position 595, numbered according to the amino acid sequence of SEQ ID NO: 138; or
   [0849] (ii) the amino acid L at position 600, the amino acid S at position 601, and the amino acid P at position 602, numbered according to the amino acid sequence of SEQ ID NO: 5, 8, or 3636.
[0850] 376. The AAV capsid variant of any one of embodiments 337-375, which further comprises:
   [0851] (i) one, two, or all of an amino acid other than V at position 596, an amino acid other than Q at position 597, and/or an amino acid other than N at position 598, numbered according to the amino acid sequence of SEQ ID NO: 138; or
   [0852] (ii) one, two, or all of an amino acid other than V at position 603, an amino acid other than Q at position 604, and/or an amino acid other than N at position 605, numbered according to the amino acid sequence of SEQ ID NO: 5, 8, 3636.
[0853] 377. The AAV capsid variant of any one of embodiments 337-376, which further comprises an amino acid other than Q at position 597 numbered according to the amino acid sequence of SEQ ID NO: 138 or at position 604 numbered according to SEQ ID NO: 5, 8, or 3636.
[0854] 378. The AAV capsid variant of any one of embodiments 337-376, which further comprises the amino acid P at position 597 numbered according to the amino acid sequence of SEQ ID NO: 138 or at position 604 numbered according to SEQ ID NO: 5, 8, or 3636.
[0855] 379. The AAV capsid variant of any one of embodiments 337-376, which further comprises the amino acid K at position 597 numbered according to the amino acid sequence of SEQ ID NO: 138 or at position 604 numbered according to SEQ ID NO: 5, 8, or 3636.
[0856] 380. The AAV capsid variant of any one of embodiments 337-376, which further comprises the amino acid E or H at position 597 numbered according to the amino acid sequence of SEQ ID NO: 138 or at position 604 numbered according to SEQ ID NO: 5, 8, or 3636.
[0857] 381. The AAV capsid variant of any one of embodiments 337-380, which further comprises the amino acid L at position 593, the amino acid S at position 594, the amino acid P at position 595, and the amino acid K at position 597, numbered according to the amino acid sequence of SEQ ID NO: 138.
[0858] 382. The AAV capsid variant of any one of embodiments 337-377, 379, or 381, which further comprises the amino acid L at position 600, the amino acid S at position 601, the amino acid P at position 602, and the amino acid K at position 604, corresponding to or numbered according to the amino acid sequence of SEQ ID NO: 8 or 3636.
[0859] 383. The AAV capsid variant of any one of embodiments 337-377, 379, 381, or 382, which comprises:
   [0860] (i) the amino acid sequence of PLNGAVHLY (SEQ ID NO: 3648), optionally where the amino acid sequence is present immediately subsequent to position 586 and replaces positions 587 and 588 (e.g., A587 and Q 588), numbered according to SEQ ID NO: 138; and
   [0861] (ii) the amino acid L at position 593, the amino acid S at position 594, the amino acid P at position 595, and the amino acid K at position 597, numbered according to the amino acid sequence of SEQ ID NO: 138.
[0862] 384. The AAV capsid variant of any one of embodiments 337-377, 379, or 381-383, which comprises:
   [0863] (i) the amino acid P at position 587, the amino acid L at position 588, and the amino acid sequence NGAVHLY (SEQ ID NO: 3689), which is present immediately subsequent to position 588, numbered according to SEQ ID NO: 138; and
   [0864] (ii) the amino acid L at position 593, the amino acid S at position 594, the amino acid P at position 595, and the amino acid K at position 597, numbered according to the amino acid sequence of SEQ ID NO: 138.
[0865] 385. The AAV capsid variant of any one of embodiments 337-377, 379, or 381-384, which comprises:
   [0866] (i) the amino acid P at position 587, the amino acid L at position 588, and the amino acid sequence NGAVHLY (SEQ ID NO: 3689), which is present immediately subsequent to position 588, numbered according to SEQ ID NO: 8 or 3636; and
   [0867] (ii) the amino acid L at position 600, the amino acid S at position 601, the amino acid P at position 602, and the amino acid K at position 604, corresponding to or numbered according to the amino acid sequence of SEQ ID NO: 8 or 3636.
[0868] 386. The AAV capsid variant of any one of embodiments 337-378, which further comprises the amino acid P at position 597, numbered according to the amino acid sequence of SEQ ID NO: 138.
[0869] 387. The AAV capsid variant of any one of embodiments 337-378 or 386, which further comprises the amino acid P at position 604, corresponding to or numbered according to the amino acid sequence of SEQ ID NO: 5 or 3636.
[0870] 388. The AAV capsid variant of any one of embodiments 337-378, 386, or 387, which comprises:
   [0871] (i) the amino acid sequence of PLNGAVHLY (SEQ ID NO: 3648), optionally where the amino acid sequence is present immediately subsequent to position 586 and replaces positions 587 and 588 (e.g., A587 and Q 588), numbered according to SEQ ID NO: 138; and
   [0872] (ii) the amino acid P at position 597, numbered according to the amino acid sequence of SEQ ID NO: 138.
[0873] 389. The AAV capsid variant of any one of embodiments 337-378 or 386-388, which comprises:
   [0874] (i) the amino acid P at position 587, the amino acid L at position 588, and the amino acid sequence NGAVHLY (SEQ ID NO: 3689), which is present immediately subsequent to position 588, numbered according to SEQ ID NO: 138; and
   [0875] (ii) the amino acid P at position 597, numbered according to the amino acid sequence of SEQ ID NO: 138.
[0876] 390. The AAV capsid variant of any one of embodiments 337-378 or 386-389, which comprises:
   [0877] (i) the amino acid P at position 587, the amino acid L at position 588, and the amino acid sequence NGAVHLY (SEQ ID NO: 3689), which is present immediately subsequent to position 588, numbered according to SEQ ID NO: 5 or 3636; and
   [0878] (ii) the amino acid P at position 604, corresponding to or numbered according to the amino acid sequence of SEQ ID NO: 5 or 3636.
[0879] 391. An AAV capsid variant comprising:
   [0880] (i) the amino acid sequence of PLNGAVHLY (SEQ ID NO: 3648), optionally where the amino acid sequence is present immediately subsequent to position 586 and replaces positions 587 and 588 (e.g., A587 and Q 588), numbered according to SEQ ID NO: 138; and
   [0881] (ii) the amino acid L at position 593, the amino acid S at position 594, the amino acid P at position 595, and the amino acid K at position 597, numbered according to the amino acid sequence of SEQ ID NO: 138.
[0882] 392. An AAV capsid variant comprising:
   [0883] (i) the amino acid P at position 587, the amino acid L at position 588, and the amino acid sequence NGAVHLY (SEQ ID NO: 3689), which is present immediately subsequent to position 588, numbered according to SEQ ID NO: 138; and
   [0884] (ii) the amino acid L at position 593, the amino acid S at position 594, the amino acid P at position 595, and the amino acid K at position 597, numbered according to the amino acid sequence of SEQ ID NO: 138.
[0885] 393. An AAV capsid variant comprising:
   [0886] (i) the amino acid P at position 587, the amino acid L at position 588, and the amino acid sequence NGAVHLY (SEQ ID NO: 3689), which is present immediately subsequent to position 588, numbered according to SEQ ID NO: 8 or 3636; and
   [0887] (ii) the amino acid L at position 600, the amino acid S at position 601, the amino acid P at position 602, and the amino acid K at position 604, corresponding to or numbered according to the amino acid sequence of SEQ ID NO: 8 or 3636.
[0888] 394. An AAV capsid variant comprising:
   [0889] (i) the amino acid sequence of PLNGAVHLY (SEQ ID NO: 3648), optionally where the amino acid sequence is present immediately subsequent to position 586 and replaces positions 587 and 588 (e.g., A587 and Q 588), numbered according to SEQ ID NO: 138; and
   [0890] (ii) the amino acid P at position 597, numbered according to the amino acid sequence of SEQ ID NO: 138.
[0891] 395. An AAV capsid variant comprising:
   [0892] (i) the amino acid P at position 587, the amino acid L at position 588, and the amino acid sequence NGAVHLY (SEQ ID NO: 3689), which is present immediately subsequent to position 588, numbered according to SEQ ID NO: 138; and
   [0893] (ii) the amino acid P at position 597, numbered according to the amino acid sequence of SEQ ID NO: 138.
[0894] 396. An AAV capsid variant comprising:
   [0895] (i) the amino acid P at position 587, the amino acid L at position 588, and the amino acid sequence NGAVHLY (SEQ ID NO: 3689), which is present immediately subsequent to position 588, numbered according to SEQ ID NO: 5 or 3636; and
   [0896] (ii) the amino acid P at position 604, corresponding to or numbered according to the amino acid sequence of SEQ ID NO: 5 or 3636.
[0897] 397. The AAV capsid variant, of any one of the preceding embodiments, which further comprises:
   [0898] (i) a modification, e.g., an insertion, substitution (e.g., conservative substitution), and/or deletion, in loop I, II, IV, and/or VI; and/or
   [0899] (ii) a substitution at position K449, e.g., a K449R substitution, numbered according to SEQ ID NO: 138.
[0900] 398. The AAV capsid variant of any one of the preceding embodiments, which comprises an amino acid sequence comprising at least one, two or three modifications, e.g., substitutions (e.g., conservative substitutions), but not more than 30, 20 or 10 modifications, e.g., substitutions (e.g., conservative substitutions), relative to the amino acid sequence of SEQ ID NO: 138.
[0901] 399. The AAV capsid variant, of any one of the preceding embodiments, which comprises an amino acid sequence comprising at least one, two or three, but no more than 30, 20 or 10 different amino acids relative to the amino acid sequence of SEQ ID NO: 138.
[0902] 400. The AAV capsid variant, of any one of the preceding embodiments, which comprises the amino acid sequence of SEQ ID NO: 138, or an amino acid sequence with at least 80% (e.g., at least about 85, 90, 95, 96, 97, 98, or 99%) sequence identity thereto.
[0903] 401. The AAV capsid variant, of any one of the preceding embodiments, which comprises the amino acid sequence of SEQ ID NO: 138.
[0904] 402. The AAV capsid variant, of any one of the preceding embodiments, which comprises an amino acid sequence encoded by the nucleotide sequence of SEQ ID NO: 137, or a sequence with at least 80% (e.g., at least about 85, 90, 95, 96, 97, 98, or 99%) sequence identity thereto.
[0905] 403. The AAV capsid variant, of any one of the preceding embodiments, wherein the nucleotide sequence encoding the capsid variant comprises the nucleotide sequence of SEQ ID NO: 137, or a sequence with at least 80% (e.g., at least about 85, 90, 95, 96, 97, 98, or 99%) sequence identity thereto.
[0906] 404. The AAV capsid variant, of any one of the preceding embodiments, which comprises the amino acid sequence of SEQ ID NO: 5 or 8, or a sequence with at least 80% (e.g., at least about 85, 90, 95, 96, 97, 98, or 99%) sequence identity thereto.
[0907] 405. The AAV capsid variant, of any one of the preceding embodiments, wherein the nucleotide sequence encoding the capsid variant comprises the nucleotide sequence of SEQ ID NO: 4 or 7, or a sequence with at least 80% (e.g., at least about 85, 90, 95, 96, 97, 98, or 99%) sequence identity thereto.
[0908] 406. The AAV capsid variant, of any one of the preceding embodiments, which comprises a VP1 protein, a VP2 protein, a VP3 protein, or a combination thereof, optionally wherein the AAV capsid variant comprises:
   [0909] (i) the amino acid sequence corresponding to positions 138-743, e.g., a VP2, of SEQ ID NO: 5, 8, or 3636, or a sequence with at least 80% (e.g., at least about 85, 90, 95, 96, 97, 98, or 99%) sequence identity thereto;
   [0910] (ii) the amino acid sequence corresponding to positions 138-736, e.g., a VP2, of SEQ ID NO: 138, or a sequence with at least 80% (e.g., at least about 85, 90, 95, 96, 97, 98, or 99%) sequence identity thereto;
   [0911] (iii) the amino acid sequence corresponding to positions 203-743, e.g., a VP3, of SEQ ID NO: 5, 8, or 3636, or a sequence with at least 80% (e.g., at least about 85, 90, 95, 96, 97, 98, or 99%) sequence identity thereto; and/or
   [0912] (iv) the amino acid sequence corresponding to positions 203-736, e.g., a VP3, of SEQ ID NO: 138, or a sequence with at least 80% (e.g., at least about 85, 90, 95, 96, 97, 98, or 99%) sequence identity thereto.
[0913] 407. An AAV capsid variant comprising the amino acid sequence of SEQ ID NO: 5.
[0914] 408. The AAV capsid variant of embodiment 407, wherein the nucleotide sequence encoding the AAV capsid variant comprises the nucleotide sequence of SEQ ID NO: 4.
[0915] 409. An AAV capsid variant comprising the amino acid sequence of SEQ ID NO: 8.
[0916] 410. The AAV capsid variant of embodiment 409, wherein the nucleotide sequence encoding the AAV capsid variant comprises the nucleotide sequence of SEQ ID NO: 7.
[0917] 411. The AAV capsid variant, of any one of the preceding embodiments, which does not comprise:
   [0918] (i) the amino acid sequence of TLAVPFK (SEQ ID NO: 1262) present immediately subsequent to position 588, numbered according to SEQ ID NO: 138;
   [0919] (ii) an amino acid sequence present immediately subsequent to position 586 to 599, e.g., 586 to 594, 587 to 595, 588 to 596, 589 to 597, 590 to 598 numbered relative to SEQ ID NO: 138, having at least 5 consecutive amino acids corresponding to positions 586 to 594 numbered relative to SEQ ID NO: 138, of any the amino acid sequences provided in Table 1 of WO2020223276, the contents of which are hereby incorporated by reference in their entirety; or
   [0920] (iii) an amino acid sequence present immediately subsequent to position 586 to 599, e.g., 586 to 594, 587 to 595, 588 to 596, 589 to 597, 590 to 598 numbered relative to SEQ ID NO: 138, having at least 5 consecutive amino acids corresponding to positions 586 to 594 numbered relative to SEQ ID NO: 138, of any SEQ ID NOs: 1, 3, 12, 13, or 138.
[0921] 412. The AAV capsid variant, of any one of the preceding embodiments, which has an increased tropism for a CNS cell or tissue, e.g., a brain cell, brain tissue, spinal cord cell, or spinal cord tissue, relative to the tropism of a reference sequence comprising the amino acid sequence of SEQ ID NO: 138.
[0922] 413. The AAV capsid variant, of any one of the preceding embodiments, which has an increased tropism for a CNS cell or tissue, e.g., a brain cell, brain tissue, spinal cord cell, or spinal cord tissue, relative to the tropism of a reference sequence comprising the amino acid sequence of SEQ ID NO: 3636.
[0923] 414. The AAV capsid variant of any one of embodiments 1-413, which is enriched at least about 1.1, 1.2, 1.3, 1.4, 1.5, 1.6, 1.7, 1.8, 1.9, 2, 2.5, 3, 3.5, 4, 4.5, 5, 5.5, or 6-fold, in the brain compared to a reference sequence of SEQ ID NO: 3636, e.g., when measured by an assay as described in Example 7.
[0924] 415. The AAV capsid variant of any one of embodiments 1-413, which is enriched at least about 2, 2.5, 3, 3.5, 4, 4.5, 5, 5.5, or 6-fold, in the brain compared to a reference sequence of SEQ ID NO: 3636, e.g., when measured by an assay as described in Example 7.
[0925] 416. The AAV capsid variant of any one of embodiments 62-118, 337, 340, 345, 348, 353, 354, or 359, which results in greater than 1, 2, 5, 10, 20, 30, 40, 50, or 100 reads per sample, e.g., when analyzed by an NGS sequencing assay, e.g., as described in Example 7.
[0926] 417. The AAV capsid variant of any one of embodiments 1-416, which is enriched in the brain of at least two to three species, e.g., a non-human primate and rodent (e.g., mouse), e.g., as compared to a reference sequence of SEQ ID NO: 138.
[0927] 418. The AAV capsid variant of embodiment 417, wherein the at least two to three species are Macaca fascicularis, Chlorocebus sabaeus, Callithrix jacchus, and/or mouse (e.g., BALB/c mice).
[0928] 419. The AAV capsid variant of any one of the preceding embodiments, which further comprises a modification, e.g., substitution (e.g., conservative substitution), insertion, or deletion, that results in one, two, three or all of: (1) reduced tropism in the liver; (2) de-targeted expression in the liver; (3) reduced activity in the liver; and/or (4) reduced binding to galactose.
[0929] 420. The AAV capsid variant of any one of the preceding embodiments, which further comprises:
   [0930] (i) a modification e.g., substitution (e.g., conservative substitution), insertion, or deletion, at position N470 (e.g., N470A), D271 (e.g., D271A), N272 (e.g., N297A), Y446 (e.g., Y446A), N498 (e.g., N498Y or N498I), W503 (e.g., W530R or W530A), L620 (e.g., L620F), or a combination thereof, relative to a reference sequence numbered according to SEQ ID NO: 138; or
   [0931] (ii) one, two, three, four, five or all of an amino acid other than N at position 470 (e.g., A), an amino acid other than D at position 271 (e.g., A), an amino acid other than N at position 272 (e.g., A), an amino acid other than Y at position 446 (e.g., A), and amino acid other than N at position 498 (e.g., Y or I), and amino acid other than W at position 503 (e.g., R or A), and amino acid other than L at position 620 (e.g., F), relative to a reference sequence numbered according to SEQ ID NO: 138.
[0932] 421. A polynucleotide encoding the AAV capsid variant of any one of embodiments 1-420.
[0933] 422. The polynucleotide of embodiment 421, which comprises a nucleotide sequence that is codon optimized.
[0934] 423. A peptide comprising:
   [0935] (a) the amino acid sequence of any of the sequences provided in Tables 1A, 1B, 10, or 20;
   [0936] (b) an amino acid sequence comprising at least 3, 4, 5, 6, 7, 8, 9, 10, 11, 12, 13, 14, 15, 16, 17, 18, 19, 20 consecutive amino acids from any one of the sequences provided in Tables 1A, 1B, 10, or 20;
   [0937] (c) an amino acid sequence comprising at least one, two, or three but no more than four different amino acids relative to the amino acid sequence of any one of the sequences provided in Tables 1A, 1B, 10, or 20; or
   [0938] (d) an amino acid sequence comprising at least one, two, or three but no more than four modifications, e.g., substitutions (e.g., conservative substitutions), relative to the amino acid sequence of any one of the sequences provided in Tables 1A, 1B, 10, or 20;
   [0939] optionally provided that the amino acid sequence is not PLN, PLNG (SEQ ID NO: 3678), PLNGA (SEQ ID NO: 3679), PLNGAV (SEQ ID NO: 3680), PLNGAVHL (SEQ ID NO: 3682), and/or PLNGAVHLY (SEQ ID NO: 3648).
[0940] 424. A peptide comprising:
   [0941] (a) the amino acid sequence of any one of SEQ ID NOs: 139-476;
   [0942] (b) an amino acid sequence comprising at least 3, 4, 5, 6, 7, 8, 9, 10, 11, 12, 13, 14, 15, 16, 17, or 18 consecutive amino acids from any one of SEQ ID NOs: 139-476; or
   [0943] (c) an amino acid sequence comprising at least one, two, or three but no more than four different amino acids, relative to the amino acid sequence of any one of SEQ ID NOs: 139-476;
   [0944] (d) an amino sequence comprising at least one, two, or three but no more than four modifications, e.g., substitutions (e.g., conservative substitutions), relative to the amino acid sequence of any one of SEQ ID NOs: 139-476;
   [0945] optionally provided that the amino acid sequence is not PLN, PLNG (SEQ ID NO: 3678), PLNGA (SEQ ID NO: 3679), PLNGAV (SEQ ID NO: 3680), PLNGAVHL (SEQ ID NO: 3682), and/or PLNGAVHLY (SEQ ID NO: 3648).
[0946] 425. A peptide comprising one, two, three, four, or all of:
   [0947] (i) an [N1], wherein [N1] is or comprises: PLNGA (SEQ ID NO: 3679), SLNGA (SEQ ID NO: 4684), QLNGA (SEQ ID NO: 4685), ALNGA (SEQ ID NO: 4686), PLNGS (SEQ ID NO: 4687), PVNGA (SEQ ID NO: 4688), PLNGG (SEQ ID NO: 4689), PLNGT (SEQ ID NO: 4690), PLDGA (SEQ ID NO: 4691), QLNGS (SEQ ID NO: 4692), PLNGN (SEQ ID NO: 4693), SLDGA (SEQ ID NO: 4694), HLNGA (SEQ ID NO: 4695), ALNGT (SEQ ID NO: 4696), PINGA (SEQ ID NO: 4697), ALDGA (SEQ ID NO: 4698), PLNCA (SEQ ID NO: 4699), PLNGQ (SEQ ID NO: 4700), PLDSA (SEQ ID NO: 4701), RLDGA (SEQ ID NO: 4702), QLNGN (SEQ ID NO: 4703), PLNGY (SEQ ID NO: 4704), PLDSS (SEQ ID NO: 4705), PLNGC (SEQ ID NO: 4706), PLYGA (SEQ ID NO: 4707), TLNGA (SEQ ID NO: 4708), PVDGA (SEQ ID NO: 4709), PLKGA (SEQ ID NO: 4710), PLNGD (SEQ ID NO: 4711), KLDGA (SEQ ID NO: 4712), PHNGA (SEQ ID NO: 4713), PLNGV (SEQ ID NO: 4714), PLNAA (SEQ ID NO: 4715), QLNGY (SEQ ID NO: 4716), PLDGS (SEQ ID NO: 4717), LLNGA (SEQ ID NO: 4718), PLNRA (SEQ ID NO: 4719), PLIGA (SEQ ID NO: 4720), PRNGA (SEQ ID NO: 4721), or ALNGS (SEQ ID NO: 4722);
   [0948] (ii) an [N2] wherein [N2] is or comprises: VHLY (SEQ ID NO: 4680), VHVY (SEQ ID NO: 4682), VPLY (SEQ ID NO: 4723), VNLY (SEQ ID NO: 4724), VHRY (SEQ ID NO: 4725), VHIY (SEQ ID NO: 4681), VHHY (SEQ ID NO: 4683), FHLY (SEQ ID NO: 4726), LHLY (SEQ ID NO: 4727), DHLY (SEQ ID NO: 4728), VQLY (SEQ ID NO: 4729), IHLY (SEQ ID NO: 4730), VDLY (SEQ ID NO: 4731), AHLY (SEQ ID NO: 4732), VLLY (SEQ ID NO: 4733), GHLY (SEQ ID NO: 4734), VRLY (SEQ ID NO: 4735), or VYLY (SEQ ID NO: 4736);
   [0949] (iii) an [N3] wherein [N3] is or comprises: AQAQ (SEQ ID NO: 4737), SQAQ (SEQ ID NO: 4738), AQPQ (SEQ ID NO: 4739), AQSQ (SEQ ID NO: 4740), AKAQ (SEQ ID NO: 4741), AHAQ (SEQ ID NO: 4742), AQAP (SEQ ID NO: 4743), DQAQ (SEQ ID NO: 4744), APAQ (SEQ ID NO: 4745), AQAK (SEQ ID NO: 4746), AQAH (SEQ ID NO: 4747), AQEQ (SEQ ID NO: 4748), ALAQ (SEQ ID NO: 4749), ARAQ (SEQ ID NO: 4750), or TQAQ (SEQ ID NO: 4751);
   [0950] (iv) an [N4] wherein [N4] is or comprises: TGW, TGL, TGS, TGG, TAW, TGR, TAS, LSS, TSS, SSL, SSS, TLS, TVS, VSS, TSP, VSP, TMS, LSP, VAS, TAL, TTS, TLP, VLP, RGW, LSG, LAS, SSP, LLP, STS, TSA, TTP, SAL, LGS, VTP, VSA, IGW, TGF, LTP, TLA, LSA, TVG, TAP, TMP, TSL, VQS, SSM, SLP, VSQ, RSS, TST, VMS, TTA, TQP, LST, LAP, TVA, RLS, TGY, TSG, TAG, VMP, TSQ, TMA, VGS, TSW, TGV, TGT, TLG, LMP, VQP, TGM, SMS, SQL, IGS, RSV, TAA, STP, LSQ, TAQ, TGP, ASP, VSG, SAP, TLQ, LQP, TAT, TGQ, ATS, IGG, VAA, TSM, TVW, TAM, TGA, VAT, QSP, TQA, VQA, RSP, LAT, VAQ, LAA, RST, RTL, LGT, LMS, LGP, RTS, SQP, VLG, SVS, TMQ, SAV, LAG, SGP, TNS, RLT, TTQ, SAA, TSV, RLG, RAS, STQ, CSP, SAG, ALP, VTS, ISP, SVG, LTS, TTT, RSG, TQL, LNP, TVQ, IAS, LAQ, LSR, LSN, TTG, TSN, SMA, TKS, SVA, TQQ, VQQ, RLP, SAM, TAV, TQW, SSR, TQT, VNS, RSA, LMG, RQS, LVG, VTA, RTT, SMG, VMA, TKP, SAQ, NSP, ATP, VAG, RGS, VKP, RMS, NLP, NAL, RTP, RQL, VQG, VTG, VST, NAS, RVE, ATG, AMS, RNS, VMQ, SMQ, LQQ, TMG, LGQ, TSH, AAP, RSQ, TYS, ITP, VAK, TQM, TKA, SQQ, ISG, VSR, RTA, RML, SQM, VAN, CTP, ISS, AGP, TAK, RTG, LHP, TMT, AQP, QAP, RQP, LKS, NTT, TSK, RYS, KSS, NTP, VGG, IAA, LMA, MAP, VHP, VLS, LAN, ATQ, TNA, TAN, VSN, AAA, AVG, LTA, SAN, RAG, RQG, TLR, LSH, SAF, RAA, IQP, ILG, VNG, SVQ, LSK, TNG, RTQ, TMN, RGG, TTR, VRP, VKA, LAR, NQP, TMK, TYA, TQK, TTK, IAG, TQN, LAH, NTQ, RQQ, RAQ, TKQ, TQH, TNQ, LMQ, VNA, VQT, TQR, VGK, VKQ, IQS, LQR, TMM, VGN, RIG, SAK, RIA, VQN, NVQ, RIP, NAQ, NMQ, TPS, LTN, VTK, PGW, LPP, SPP, TPA, TGC, VPP, TPT, TPW, TPP, RPP, TPQ, TPR, TPG, VPA, VPQ, RPG, KGW, TRW, TAR, IPP, RSL, LVP, KGS, VAP, KGG, KAW, PGS, TRL, or AGW; and/or (v) an [N5] wherein [N5] is or comprises: VQN, VKN, VQT, VQK, DQN, VQH, GQN, VQI, VHN, FQN, LQN, VLN, VRN, VQS, VQY, AQN, VEN, VQD, VPN, IQN, VKK, DKN, VKT, VQP, EQN, GQT, FQK, GHN, or VPH; and/or wherein the AAV capsid variant comprises an amino acid modification, e.g., a conservative substitution, of any of the aforesaid amino acids in (i)-(v).
[0951] 426. A polynucleotide encoding an AAV capsid variant comprising:
   [0952] (a) the amino acid sequence of any one of SEQ ID NOs: 139-476;
   [0953] (b) an amino acid sequence comprising at least 3, 4, 5, 6, 7, 8, 9, 10, 11, 12, 13, 14, 15, 16, 17, or 18 consecutive amino acids from any one of SEQ ID NOs: 139-476; or
   [0954] (c) an amino acid sequence comprising at least one, two, or three but no more than four different amino acids, relative to the amino acid sequence of any one of SEQ ID NOs: 139-476;
   [0955] (d) an amino sequence comprising at least one, two, or three but no more than four modifications, e.g., substitutions (e.g., conservative substitutions), relative to the amino acid sequence of any one of SEQ ID NOs: 139-476;
   [0956] optionally wherein:
   [0957] (i) the amino acid sequence of (a), (b), (c), and/or (d) is present immediately subsequent to position 586, 587, 588, 589, 590, 591, 592, 593, 594, or 595, relative to a reference sequence numbered according to the amino acid sequence of SEQ ID NO: 138; or
   [0958] (ii) the amino acid sequence is not PLN, PLNG (SEQ ID NO: 3678), PLNGA (SEQ ID NO: 3679), PLNGAV (SEQ ID NO: 3680), PLNGAVHL (SEQ ID NO: 3682), and/or PLNGAVHLY (SEQ ID NO: 3648).
[0959] 427. A polynucleotide encoding an AAV capsid variant comprising:
   [0960] (i) an [N1], wherein [N1] is or comprises: PLNGA (SEQ ID NO: 3679), SLNGA (SEQ ID NO: 4684), QLNGA (SEQ ID NO: 4685), ALNGA (SEQ ID NO: 4686), PLNGS (SEQ ID NO: 4687), PVNGA (SEQ ID NO: 4688), PLNGG (SEQ ID NO: 4689), PLNGT (SEQ ID NO: 4690), PLDGA (SEQ ID NO: 4691), QLNGS (SEQ ID NO: 4692), PLNGN (SEQ ID NO: 4693), SLDGA (SEQ ID NO: 4694), HLNGA (SEQ ID NO: 4695), ALNGT (SEQ ID NO: 4696), PINGA (SEQ ID NO: 4697), ALDGA (SEQ ID NO: 4698), PLNCA (SEQ ID NO: 4699), PLNGQ (SEQ ID NO: 4700), PLDSA (SEQ ID NO: 4701), RLDGA (SEQ ID NO: 4702), QLNGN (SEQ ID NO: 4703), PLNGY (SEQ ID NO: 4704), PLDSS (SEQ ID NO: 4705), PLNGC (SEQ ID NO: 4706), PLYGA (SEQ ID NO: 4707), TLNGA (SEQ ID NO: 4708), PVDGA (SEQ ID NO: 4709), PLKGA (SEQ ID NO: 4710), PLNGD (SEQ ID NO: 4711), KLDGA (SEQ ID NO: 4712), PHNGA (SEQ ID NO: 4713), PLNGV (SEQ ID NO: 4714), PLNAA (SEQ ID NO: 4715), QLNGY (SEQ ID NO: 4716), PLDGS (SEQ ID NO: 4717), LLNGA (SEQ ID NO: 4718), PLNRA (SEQ ID NO: 4719), PLIGA (SEQ ID NO: 4720), PRNGA (SEQ ID NO: 4721), or ALNGS (SEQ ID NO: 4722);
   [0961] (ii) an [N2] wherein [N2] is or comprises: VHLY (SEQ ID NO: 4680), VHVY (SEQ ID NO: 4682), VPLY (SEQ ID NO: 4723), VNLY (SEQ ID NO: 4724), VHRY (SEQ ID NO: 4725), VHIY (SEQ ID NO: 4681), VHHY (SEQ ID NO: 4683), FHLY (SEQ ID NO: 4726), LHLY (SEQ ID NO: 4727), DHLY (SEQ ID NO: 4728), VQLY (SEQ ID NO: 4729), IHLY (SEQ ID NO: 4730), VDLY (SEQ ID NO: 4731), AHLY (SEQ ID NO: 4732), VLLY (SEQ ID NO: 4733), GHLY (SEQ ID NO: 4734), VRLY (SEQ ID NO: 4735), or VYLY (SEQ ID NO: 4736);
   [0962] (iii) an [N3] wherein [N3] is or comprises: AQAQ (SEQ ID NO: 4737), SQAQ (SEQ ID NO: 4738), AQPQ (SEQ ID NO: 4739), AQSQ (SEQ ID NO: 4740), AKAQ (SEQ ID NO: 4741), AHAQ (SEQ ID NO: 4742), AQAP (SEQ ID NO: 4743), DQAQ (SEQ ID NO: 4744), APAQ (SEQ ID NO: 4745), AQAK (SEQ ID NO: 4746), AQAH (SEQ ID NO: 4747), AQEQ (SEQ ID NO: 4748), ALAQ (SEQ ID NO: 4749), ARAQ (SEQ ID NO: 4750), or TQAQ (SEQ ID NO: 4751);
   [0963] (iv) an [N4] wherein [N4] is or comprises: TGW, TGL, TGS, TGG, TAW, TGR, TAS, LSS, TSS, SSL, SSS, TLS, TVS, VSS, TSP, VSP, TMS, LSP, VAS, TAL, TTS, TLP, VLP, RGW, LSG, LAS, SSP, LLP, STS, TSA, TTP, SAL, LGS, VTP, VSA, IGW, TGF, LTP, TLA, LSA, TVG, TAP, TMP, TSL, VQS, SSM, SLP, VSQ, RSS, TST, VMS, TTA, TQP, LST, LAP, TVA, RLS, TGY, TSG, TAG, VMP, TSQ, TMA, VGS, TSW, TGV, TGT, TLG, LMP, VQP, TGM, SMS, SQL, IGS, RSV, TAA, STP, LSQ, TAQ, TGP, ASP, VSG, SAP, TLQ, LQP, TAT, TGQ, ATS, IGG, VAA, TSM, TVW, TAM, TGA, VAT, QSP, TQA, VQA, RSP, LAT, VAQ, LAA, RST, RTL, LGT, LMS, LGP, RTS, SQP, VLG, SVS, TMQ, SAV, LAG, SGP, TNS, RLT, TTQ, SAA, TSV, RLG, RAS, STQ, CSP, SAG, ALP, VTS, ISP, SVG, LTS, TTT, RSG, TQL, LNP, TVQ, IAS, LAQ, LSR, LSN, TTG, TSN, SMA, TKS, SVA, TQQ, VQQ, RLP, SAM, TAV, TQW, SSR, TQT, VNS, RSA, LMG, RQS, LVG, VTA, RTT, SMG, VMA, TKP, SAQ, NSP, ATP, VAG, RGS, VKP, RMS, NLP, NAL, RTP, RQL, VQG, VTG, VST, NAS, RVE, ATG, AMS, RNS, VMQ, SMQ, LQQ, TMG, LGQ, TSH, AAP, RSQ, TYS, ITP, VAK, TQM, TKA, SQQ, ISG, VSR, RTA, RML, SQM, VAN, CTP, ISS, AGP, TAK, RTG, LHP, TMT, AQP, QAP, RQP, LKS, NTT, TSK, RYS, KSS, NTP, VGG, IAA, LMA, MAP, VHP, VLS, LAN, ATQ, TNA, TAN, VSN, AAA, AVG, LTA, SAN, RAG, RQG, TLR, LSH, SAF, RAA, IQP, ILG, VNG, SVQ, LSK, TNG, RTQ, TMN, RGG, TTR, VRP, VKA, LAR, NQP, TMK, TYA, TQK, TTK, IAG, TQN, LAH, NTQ, RQQ, RAQ, TKQ, TQH, TNQ, LMQ, VNA, VQT, TQR, VGK, VKQ, IQS, LQR, TMM, VGN, RIG, SAK, RIA, VQN, NVQ, RIP, NAQ, NMQ, TPS, LTN, VTK, PGW, LPP, SPP, TPA, TGC, VPP, TPT, TPW, TPP, RPP, TPQ, TPR, TPG, VPA, VPQ, RPG, KGW, TRW, TAR, IPP, RSL, LVP, KGS, VAP, KGG, KAW, PGS, TRL, or AGW; and/or
   [0964] (v) an [N5] wherein [N5] is or comprises: VQN, VKN, VQT, VQK, DQN, VQH, GQN, VQI, VHN, FQN, LQN, VLN, VRN, VQS, VQY, AQN, VEN, VQD, VPN, IQN, VKK, DKN, VKT, VQP, EQN, GQT, FQK, GHN, or VPH; and/or
   [0965] wherein the AAV capsid variant comprises an amino acid modification, e.g., a conservative substitution, of any of the aforesaid amino acids in (i)-(v).
[0966] 428. The polynucleotide, peptide, or AAV capsid variant, of any one of embodiments 1-427, which is isolated, e.g., recombinant.
[0967] 429. An AAV particle comprising the AAV capsid variant of any one of embodiments 1-420 or an AAV capsid variant comprising the peptide of any one of embodiments 423-425.
[0968] 430. The AAV particle of embodiment 429, which comprises a nucleotide sequence encoding a payload.
[0969] 431. The AAV particle of embodiment 460, wherein the encoded payload comprises a therapeutic protein or functional variant thereof; an antibody or antibody fragment; an enzyme; a component of a gene editing system; an RNAi agent (e.g., a dsRNA, siRNA, shRNA, pre-miRNA, pri-miRNA, miRNA, stRNA, lncRNA, piRNA, or snoRNA); or a combination thereof.
[0970] 432. The AAV particle of embodiment 431, wherein the therapeutic protein or functional variant thereof, e.g., a recombinant protein, is associated with (e.g., aberrantly expressed in) a neurological or neurodegenerative disorder, a muscular or neuromuscular disorder, or a neuro-oncological disorder.
[0971] 433. The AAV particle of embodiment 430 or 431, the therapeutic protein or functional variant thereof is chosen from apolipoprotein E (APOE) (e.g., ApoE2, ApoE3 and/or ApoE4); human survival of motor neuron (SMN) 1 or SMN2; glucocerebrosidase (GBA1); aromatic L-amino acid decarboxylase (AADC); aspartoacylase (ASPA); tripeptidyl peptidase I (CLN2); beta-galactosidase (GLB1); N-sulphoglucosamine sulphohydrolase (SGSH); N-acetyl-alpha-glucosaminidase (NAGLU); iduronate 2-sulfatase (IDS); intracellular cholesterol transporter (NPC1); gigaxonin (GAN); or a combination thereof.
[0972] 434. The AAV particle of embodiment 431, wherein the antibody or antibody binding fragment binds to:
   [0973] (i) a CNS related target, e.g., an antigen associated with a neurological or neurodegenerative disorder, e.g., β-amyloid, APOE, tau, SOD1, TDP-43, huntingtin (HTT), and/or synuclein;
   [0974] (ii) a muscular or neuromuscular related target, e.g., an antigen associated with a muscular or neuromuscular disorder; or
   [0975] (iii) a neuro-oncology related target, e.g., an antigen associated with a neuro-oncological disorder, e.g., HER2, or EGFR (e.g., EGFRvIII).
[0976] 435. The AAV particle of embodiment 431, wherein the enzyme comprises a meganuclease, a zinc finger nuclease, a TALEN, a recombinase, integrase, a base editor, a Cas9, or a fragment thereof.
[0977] 436. The AAV particle of embodiment 431, wherein the component of a gene editing system comprises one or more components of a CRISPR-Cas system.
[0978] 437. The AAV particle of embodiment 436, wherein the one or more components of the CRISPR-Cas system comprises a Cas9, e.g., a Cas9 ortholog or a Cpf1, and a single guide RNA (sgRNA), optionally wherein:
   [0979] (i) the sgRNA is located upstream (5′) of the cas9 enzyme; or
   [0980] (ii) the sgRNA is located downstream (3′) of the cas9 enzyme.
[0981] 438. The AAV particle of embodiment 431, wherein the RNAi agent (e.g., a dsRNA, siRNA, shRNA, pre-miRNA, pri-miRNA, miRNA, stRNA, lncRNA, piRNA, or snoRNA), modulates, e.g., inhibits, expression of, a CNS related gene, mRNA, and/or protein.
[0982] 439. The AAV particle of embodiment 438, wherein the CNS related gene is chosen from SOD1, MAPT, APOE, HTT, C9ORF72, TDP-43, APP, BACE, SNCA, ATXN1, ATXN3, ATXN7, SCN1A-SCN5A, SCN8A-SCN11A, or a combination thereof.
[0983] 440. The AAV particle of any one of embodiments 429-439, which comprises a viral genome comprising a promoter operably linked to the nucleic acid sequence encoding the payload.
[0984] 441. The AAV particle of embodiment 440, wherein the promoter is chosen from human elongation factor 1α-subunit (EF1α), cytomegalovirus (CMV) immediate-early enhancer and/or promoter, chicken β-actin (CBA) and its derivative CAG, β glucuronidase (GUSB), or ubiquitin C (UBC), neuron-specific enolase (NSE), platelet-derived growth factor (PDGF), platelet-derived growth factor B-chain (PDGF-β), intercellular adhesion molecule 2 (ICAM-2), synapsin (Syn), methyl-CpG binding protein 2 (MeCP2), Ca2+/calmodulin-dependent protein kinase II (CaMKII), metabotropic glutamate receptor 2 (mGluR2), neurofilament light (NFL) or heavy (NFH), β-globin minigene nβ2, preproenkephalin (PPE), enkephalin (Enk) and excitatory amino acid transporter 2 (EAAT2), glial fibrillary acidic protein (GFAP), myelin basic protein (MBP), a cardiovascular promoter (e.g., αMHC, cTnT, and CMV-MLC2k), a liver promoter (e.g., hAAT, TBG), a skeletal muscle promoter (e.g., desmin, MCK, C512) or a fragment, e.g., a truncation, or a functional variant thereof.
[0985] 442. The AAV particle of embodiment 440 or 441, wherein the promoter is an EF-1α promoter variant, e.g., a truncated EF-1α promoter.
[0986] 443. The AAV particle of any one of embodiments 440-442, wherein the promoter comprises the nucleotide sequence of any one of SEQ ID NOs: 19, 20, 22, 23, 27, 28, 30-39 or any one of the sequences provided in Table 12, a nucleotide sequence comprising at least one, two, or three but no more than four modifications, e.g., substitutions (e.g., conservative substitutions), insertions, or deletions, relative to the nucleotide sequence of SEQ ID NOs: 19, 20, 22, 23, 27, 28, 30-39 or any one of the sequences provided in Table 12, or a nucleotide sequence with at least 80% (e.g., 85%, 90%, 95%, 96%, 97%, 98%, or 99%) sequence identity to any one of SEQ ID NOs: 19, 20, 22, 23, 27, 28, 30-39 or any one of the sequences provided in Table 12.
[0987] 444. The AAV particle of any one of embodiments 440-443, wherein the viral genome further comprises a polyA signal sequence.
[0988] 445. The AAV particle of any one of embodiments 440-444, wherein the viral genome further comprises an inverted terminal repeat (ITR) sequence.
[0989] 446. The AAV particle of any one of embodiments 440-445, wherein the viral genome comprises an ITR sequence positioned 5′ relative to the encoded payload.
[0990] 447. The AAV particle of any one of embodiments 440-446, wherein the viral genome comprises an ITR sequence positioned 3′ relative to the encoded payload.
[0991] 448. The AAV particle of any one of embodiments 440-447, wherein the viral genome comprises an ITR sequence positioned 5′ relative to the encoded payload and an ITR sequence positioned 3′ relative to the encoded payload.
[0992] 449. The AAV particle of any one of embodiments 440-448, wherein the viral genome further comprises an enhancer, a Kozak sequence, an intron region, and/or an exon region.
[0993] 450. The AAV particle of any one of embodiments 440-449, wherein the viral genome further comprises a nucleotide sequence encoding a miR binding site, e.g., a miR binding site that modulates, e.g., reduces, expression of the antibody molecule encoded by the viral genome in a cell or tissue where the corresponding miRNA is expressed.
[0994] 451. The AAV particle of embodiment 450, wherein the encoded miRNA binding site is complementary, e.g., fully complementary or partially complementary, to a miRNA expressed in a cell or tissue of the DRG, liver, heart, hematopoietic, or a combination thereof.
[0995] 452. The AAV particle of embodiment 450 or 451, wherein the encoded miR binding site modulates, e.g., reduces, expression of the encoded antibody molecule in a cell or tissue of the DRG, liver, heart, hematopoietic lineage, or a combination thereof.
[0996] 453. The AAV particle of any one of embodiments 440-452, wherein the viral genome comprises at least 1-5 copies of the encoded miR binding site, e.g., at least 1, 2, 3, 4, or 5 copies.
[0997] 454. The AAV particle of any one of embodiments 440-453, wherein the viral genome comprises at least 3 copies of an encoded miR binding sites, optionally wherein all three copies comprise the same miR binding site, or at least one, two, three, or all of the copies comprise a different miR binding site.
[0998] 455. The AAV particle of embodiment 454, wherein the 3 copies of the encoded miR binding sites are continuous (e.g., not separated by a spacer), or are separated by a spacer, optionally wherein the spacer comprises the nucleotide sequence of GATAGTTA, or a nucleotide sequence having at least one, two, or three modifications, e.g., substitutions (e.g., conservative substitutions), but no more than four modifications, e.g., substitutions (e.g., conservative substitutions), relative to GATAGTTA.
[0999] 456. The AAV particle of any one of embodiments 440-455, wherein the viral genome comprises at least 4 copies of an encoded miR binding site, optionally wherein all four copies comprise the same miR binding site, or at least one, two, three, or all of the copies comprise a different miR binding site.
[1000] 457. The AAV particle of embodiment 456, wherein the 4 copies of the encoded miR binding sites are continuous (e.g., not separated by a spacer), or are separated by a spacer, optionally wherein the spacer comprises the nucleotide sequence of GATAGTTA, or a nucleotide sequence having at least one, two, or three modifications, e.g., substitutions (e.g., conservative substitutions), but no more than four modifications, e.g., substitutions (e.g., conservative substitutions), relative to GATAGTTA.
[1001] 458. The AAV particle of any one of embodiments 450-457, wherein the encoded miR binding site comprises a miR122 binding site, a miR183 binding site, a miR-1 binding site, a miR-142-3p, or a combination thereof, optionally wherein:
   [1002] (i) the encoded miR122 binding site comprises the nucleotide sequence of SEQ ID NO: 3672, or a nucleotide sequence substantially identical (e.g., having at least 70%, 75%, 80%, 85%, 90%, 92%, 95%, 97%, 98%, or 99% sequence identity) thereto; or a nucleotide sequence having at least one, two, three, four, five, six, or seven modifications, e.g., substitutions (e.g., conservative substitutions), but no more than ten modifications, e.g., substitutions (e.g., conservative substitutions), relative to SEQ ID NO: 3672;
   [1003] (ii) the encoded miR183 binding site comprises the nucleotide sequence of SEQ ID NO: 3675, or a nucleotide sequence substantially identical (e.g., having at least 70%, 75%, 80%, 85%, 90%, 92%, 95%, 97%, 98%, or 99% sequence identity) thereto; or a nucleotide sequence having at least one, two, three, four, five, six, or seven modifications, e.g., substitutions (e.g., conservative substitutions), but no more than ten modifications, e.g., substitutions (e.g., conservative substitutions), relative to SEQ ID NO: 3675;
   [1004] (iii) the encoded miR-1 binding site comprises the nucleotide sequence of SEQ ID NO: 4679, or a nucleotide sequence substantially identical (e.g., having at least 70%, 75%, 80%, 85%, 90%, 92%, 95%, 97%, 98%, or 99% sequence identity) thereto; or a nucleotide sequence having at least one, two, three, four, five, six, or seven modifications, e.g., substitutions (e.g., conservative substitutions), but no more than ten modifications, e.g., substitutions (e.g., conservative substitutions), relative to SEQ ID NO: 4679; and/or
   [1005] (iv) the encoded miR-142-3p binding site comprises the nucleotide sequence of SEQ ID NO: 3674, or a nucleotide sequence substantially identical (e.g., having at least 70%, 75%, 80%, 85%, 90%, 92%, 95%, 97%, 98%, or 99% sequence identity) thereto; or a nucleotide sequence having at least one, two, three, four, five, six, or seven modifications, e.g., substitutions (e.g., conservative substitutions), but no more than ten modifications, e.g., substitutions (e.g., conservative substitutions), relative to SEQ ID NO: 3674.
[1006] 459. The AAV particle of any one of embodiments 440-458, wherein the viral genome comprises an encoded miR122 binding site.
[1007] 460. The AAV particle of any one of embodiments 440-459, wherein the viral genome comprises at least 1-5 copies, e.g., 1, 2, or 3 copies of a miR122 binding site, optionally wherein each copy is continuous (e.g., not separated by a spacer), or each copy is separated by a spacer, optionally wherein the spacer comprises the nucleotide sequence of GATAGTTA, or a nucleotide sequence having at least one, two, or three modifications, e.g., substitutions (e.g., conservative substitutions), but no more than four modifications, e.g., substitutions (e.g., conservative substitutions), relative to GATAGTTA.
[1008] 461. The AAV particle of embodiment 459 or 460, wherein the encoded miR122 binding site comprises the nucleotide sequence of SEQ ID NO: 3672, or a nucleotide sequence substantially identical (e.g., having at least 70%, 75%, 80%, 85%, 90%, 92%, 95%, 97%, 98%, or 99% sequence identity) thereto; or a nucleotide sequence having at least one, two, three, four, five, six, or seven modifications, e.g., substitutions (e.g., conservative substitutions), but no more than ten modifications, e.g., substitutions (e.g., conservative substitutions), relative to SEQ ID NO: 3672.
[1009] 462. The AAV particle of any one of embodiments 440-461, wherein the viral genome comprises:
[1010] (A) (i) a first encoded miR122 binding site comprising the nucleotide sequence of SEQ ID NO: 3672, or a nucleotide sequence substantially identical (e.g., having at least 70%, 75%, 80%, 85%, 90%, 92%, 95%, 97%, 98%, or 99% sequence identity) thereto; or a nucleotide sequence having at least one, two, three, four, five, six, or seven modifications, e.g., substitutions (e.g., conservative substitutions), but no more than ten modifications, e.g., substitutions (e.g., conservative substitutions), relative to SEQ ID NO: 3672;
   [1011] (ii) a first spacer comprising the nucleotide sequence of GATAGTTA, or a nucleotide sequence having at least one, two, or three modifications, e.g., substitutions (e.g., conservative substitutions), but no more than four modifications, e.g., substitutions (e.g., conservative substitutions), relative to GATAGTTA; and
   [1012] (iii) a second encoded miR122 binding site comprising the nucleotide sequence of SEQ ID NO: 3672, or a nucleotide sequence substantially identical (e.g., having at least 70%, 75%, 80%, 85%, 90%, 92%, 95%, 97%, 98%, or 99% sequence identity) thereto; or a nucleotide sequence having at least one, two, three, four, five, six, or seven modifications, e.g., substitutions (e.g., conservative substitutions), but no more than ten modifications, e.g., substitutions (e.g., conservative substitutions), relative to SEQ ID NO: 3672; or
[1013] (B) (i) a first encoded miR122 binding site comprising the nucleotide sequence of SEQ ID NO: 3672, or a nucleotide sequence substantially identical (e.g., having at least 70%, 75%, 80%, 85%, 90%, 92%, 95%, 97%, 98%, or 99% sequence identity) thereto; or a nucleotide sequence having at least one, two, three, four, five, six, or seven modifications, e.g., substitutions (e.g., conservative substitutions), but no more than ten modifications, e.g., substitutions (e.g., conservative substitutions), relative to SEQ ID NO: 3672;
   [1014] (ii) a first spacer comprising the nucleotide sequence of GATAGTTA, or a nucleotide sequence having at least one, two, or three modifications, e.g., substitutions (e.g., conservative substitutions), but no more than four modifications, e.g., substitutions (e.g., conservative substitutions), relative to GATAGTTA;
   [1015] (iii) a second encoded miR122 binding site comprising the nucleotide sequence of SEQ ID NO: 3672, or a nucleotide sequence substantially identical (e.g., having at least 70%, 75%, 80%, 85%, 90%, 92%, 95%, 97%, 98%, or 99% sequence identity) thereto; or a nucleotide sequence having at least one, two, three, four, five, six, or seven modifications, e.g., substitutions (e.g., conservative substitutions), but no more than ten modifications, e.g., substitutions (e.g., conservative substitutions), relative to SEQ ID NO: 3672;
   [1016] (iv) a second spacer comprising the nucleotide sequence of GATAGTTA, or a nucleotide sequence having at least one, two, or three modifications, e.g., substitutions (e.g., conservative substitutions), but no more than four modifications, e.g., substitutions (e.g., conservative substitutions), relative to GATAGTTA; and
   [1017] (v) a third encoded miR122 binding site comprising the nucleotide sequence of SEQ ID NO: 3672, or a nucleotide sequence substantially identical (e.g., having at least 70%, 75%, 80%, 85%, 90%, 92%, 95%, 97%, 98%, or 99% sequence identity) thereto; or a nucleotide sequence having at least one, two, three, four, five, six, or seven modifications, e.g., substitutions (e.g., conservative substitutions), but no more than ten modifications, e.g., substitutions (e.g., conservative substitutions), relative to SEQ ID NO: 3672.
[1018] 463. The AAV particle of any one of embodiments 440-462, wherein the viral genome comprises an encoded miR183 binding site.
[1019] 464. The AAV particle of any one of embodiments 440-463, wherein the viral genome comprises at least 1-5 copies, e.g., 1, 2, or 3 copies of a miR183 binding site, optionally wherein each copy is continuous (e.g., not separated by a spacer), or each copy is separated by a spacer, optionally wherein the spacer comprises the nucleotide sequence of GATAGTTA, or a nucleotide sequence having at least one, two, or three modifications, e.g., substitutions (e.g., conservative substitutions), but no more than four modifications, e.g., substitutions (e.g., conservative substitutions), relative to GATAGTTA.
[1020] 465. The AAV particle of embodiment 463 or 464, wherein the encoded miR183 binding site comprises the nucleotide sequence of SEQ ID NO: 3675, or a nucleotide sequence substantially identical (e.g., having at least 70%, 75%, 80%, 85%, 90%, 92%, 95%, 97%, 98%, or 99% sequence identity) thereto; or a nucleotide sequence having at least one, two, three, four, five, six, or seven modifications, e.g., substitutions (e.g., conservative substitutions), but no more than ten modifications, e.g., substitutions (e.g., conservative substitutions), relative to SEQ ID NO: 3675.
[1021] 466. The AAV particle of any one of embodiments 440-465, wherein the viral genome comprises:
[1022] (A) (i) a first encoded miR183 binding site comprising the nucleotide sequence of SEQ ID NO: 3675, or a nucleotide sequence substantially identical (e.g., having at least 70%, 75%, 80%, 85%, 90%, 92%, 95%, 97%, 98%, or 99% sequence identity) thereto; or a nucleotide sequence having at least one, two, three, four, five, six, or seven modifications, e.g., substitutions (e.g., conservative substitutions), but no more than ten modifications, e.g., substitutions (e.g., conservative substitutions), relative to SEQ ID NO: 3675;
   [1023] (ii) a first spacer comprising the nucleotide sequence of GATAGTTA, or a nucleotide sequence having at least one, two, or three modifications, e.g., substitutions (e.g., conservative substitutions), but no more than four modifications, e.g., substitutions (e.g., conservative substitutions), relative to GATAGTTA; and
   [1024] (iii) a second encoded miR183 binding site comprising the nucleotide sequence of SEQ ID NO: 3675, or a nucleotide sequence substantially identical (e.g., having at least 70%, 75%, 80%, 85%, 90%, 92%, 95%, 97%, 98%, or 99% sequence identity) thereto; or a nucleotide sequence having at least one, two, three, four, five, six, or seven modifications, e.g., substitutions (e.g., conservative substitutions), but no more than ten modifications, e.g., substitutions (e.g., conservative substitutions), relative to SEQ ID NO: 3675; or
[1025] (B) (i) a first encoded miR183 binding site comprising the nucleotide sequence of SEQ ID NO: 3675, or a nucleotide sequence substantially identical (e.g., having at least 70%, 75%, 80%, 85%, 90%, 92%, 95%, 97%, 98%, or 99% sequence identity) thereto; or a nucleotide sequence having at least one, two, three, four, five, six, or seven modifications, e.g., substitutions (e.g., conservative substitutions), but no more than ten modifications, e.g., substitutions (e.g., conservative substitutions), relative to SEQ ID NO: 3675;
   [1026] (ii) a first spacer comprising the nucleotide sequence of GATAGTTA, or a nucleotide sequence having at least one, two, or three modifications, e.g., substitutions (e.g., conservative substitutions), but no more than four modifications, e.g., substitutions (e.g., conservative substitutions), relative to GATAGTTA;
   [1027] (iii) a second encoded miR183 binding site comprising the nucleotide sequence of SEQ ID NO: 3675, or a nucleotide sequence substantially identical (e.g., having at least 70%, 75%, 80%, 85%, 90%, 92%, 95%, 97%, 98%, or 99% sequence identity) thereto; or a nucleotide sequence having at least one, two, three, four, five, six, or seven modifications, e.g., substitutions (e.g., conservative substitutions), but no more than ten modifications, e.g., substitutions (e.g., conservative substitutions), relative to SEQ ID NO: 3675;
   [1028] (iv) a second spacer comprising the nucleotide sequence of GATAGTTA, or a nucleotide sequence having at least one, two, or three modifications, e.g., substitutions (e.g., conservative substitutions), but no more than four modifications, e.g., substitutions (e.g., conservative substitutions), relative to GATAGTTA; and
   [1029] (v) a third encoded miR183 binding site comprising the nucleotide sequence of SEQ ID NO: 3675, or a nucleotide sequence substantially identical (e.g., having at least 70%, 75%, 80%, 85%, 90%, 92%, 95%, 97%, 98%, or 99% sequence identity) thereto; or a nucleotide sequence having at least one, two, three, four, five, six, or seven modifications, e.g., substitutions (e.g., conservative substitutions), but no more than ten modifications, e.g., substitutions (e.g., conservative substitutions), relative to SEQ ID NO: 3675.
[1030] 467. The AAV particle of any one of embodiments 440-467, wherein the viral genome comprises an encoded miR122 binding site and a miR-1 binding site.
[1031] 468. The AAV particle of any one of embodiments 440-468, wherein the viral genome is single stranded or self-complementary.
[1032] 469. The AAV particle of any one of embodiments 440-469, wherein the viral genome further comprises a nucleotide sequence encoding a Rep protein, e.g., a non-structural protein, wherein the Rep protein comprises a Rep78 protein, a Rep68, Rep52 protein, and/or a Rep40 protein.
[1033] 470. The AAV particle of embodiment 469, wherein the Rep78 protein, the Rep68 protein, the Rep52 protein, and/or the Rep40 protein are encoded by at least one Rep gene.
[1034] 471. The AAV particle of any one of embodiments 440-470, wherein the viral genome further comprises a nucleic acid sequence encoding the AAV capsid variant of any one of embodiments 1-420.
[1035] 472. The AAV particle of any one of embodiments 429-471, which is isolated, e.g., recombinant.
[1036] 473. A vector comprising a polynucleotide encoding the AAV capsid variant of any one of embodiments 1-420 or 428, the polynucleotide of any one of embodiments 421,422, or 426-428, or a polynucleotide encoding the peptide of any one of embodiments 423-425 or 428.
[1037] 474. A cell, e.g., a host cell, comprising the AAV capsid variant of any one of embodiments 1-420 or 428, the polynucleotide of any one of embodiments 421, 422, or 426-428, the peptide of any one of embodiments 423-425 or 428, the AAV particle of any one of embodiments 429-472, or the vector of embodiment 273.
[1038] 475. The cell of embodiment 474, wherein the cell is a mammalian cell or an insect cell.
[1039] 476. The cell of embodiment 474 or 475, wherein the cell is a cell of a brain region or a spinal cord region, optionally a cell of the frontal cortex, sensory cortex, motor cortex, caudate, dentate nucleus, cerebellar cortex, cerebral cortex, brain stem, hippocampus, thalamus, putamen, cervical spinal cord region, thoracic spinal cord region, and/or lumbar spinal cord region.
[1040] 477. The cell of any one of embodiments 474-476, wherein the cell is a neuron, a sensory neuron, a motor neuron, an astrocyte, a glial cell, or a muscle cell (e.g., a cell of the heart, diaphragm, or quadriceps).
[1041] 478. A method of making an AAV particle, comprising
   [1042] (i) providing a host cell comprising a viral genome; and
   [1043] (ii) incubating the host cell under conditions suitable to enclose the viral genome in the AAV capsid variant of any one of embodiments 1-420, or an AAV capsid variant encoded by the polynucleotide of any one of embodiments 421, 422, or 426-428;
   [1044] thereby making the AAV particle.
[1045] 479. The method of embodiment 478, further comprising, prior to step (i), introducing a first nucleic acid molecule comprising the viral genome into the host cell.
[1046] 480. The method of embodiment 478 or 479, wherein the host cell comprises a second nucleic acid encoding the capsid variant.
[1047] 481. The method of embodiment 480, wherein the second nucleic acid molecule is introduced into the host cell prior to, concurrently with, or after the first nucleic acid molecule.
[1048] 482. A pharmaceutical composition comprising the AAV particle of any one of embodiments 429-472, an AAV particle comprising the capsid variant of any one of embodiments 1-420 or 428, an AAV particle comprising the peptide of any one of embodiments 423-425 or 428, and a pharmaceutically acceptable excipient.
[1049] 483. A method of delivering a payload to a cell or tissue (e.g., a CNS cell or a CNS tissue), comprising administering an effective amount of the pharmaceutical composition of embodiment 482, the AAV particle of any one of embodiments 429-472, an AAV particle comprising the capsid variant of any one of embodiments 1-420 or 428, an AAV particle comprising the peptide of any one of embodiments 423-425 or 428.
[1050] 484. The method of embodiment 483, wherein the cell is a cell a cell of a brain region or a spinal cord region, optionally a cell of the frontal cortex, sensory cortex, motor cortex, caudate, dentate nucleus, cerebellar cortex, cerebral cortex, brain stem, hippocampus, thalamus, putamen, cervical spinal cord region, thoracic spinal cord region, and/or lumbar spinal cord region.
[1051] 485. The method of embodiment 483 or 484, wherein the cell is a neuron, a sensory neuron, a motor neuron, an astrocyte, or a muscle cell (e.g., a cell of the heart, diaphragm, or quadriceps).
[1052] 486. The method of any one of embodiments 483-485, wherein the cell or tissue is within a subject.
[1053] 487. The method of embodiment 486, wherein the subject has, has been diagnosed with having, or is at risk of having a genetic disorder, e.g., a monogenic disorder or a polygenic disorder.
[1054] 488. The method of embodiment 486 or 487, wherein the subject has, has been diagnosed with having, or is at risk of having a neurological, e.g., a neurodegenerative disorder.
[1055] 489. The method of embodiment 486 or 487, wherein the subject has, has been diagnosed with having, or is at risk of having a muscular disorder or a neuromuscular disorder.
[1056] 490. The method of embodiment 486 or 487, wherein the subject has, has been diagnosed with having, or is at risk of having a neuro-oncological disorder.
[1057] 491. A method of treating a subject having or diagnosed with having a genetic disorder, e.g., a monogenic disorder or a polygenic disorder, comprising administering to the subject an effective amount of the pharmaceutical composition of embodiment 482, the AAV particle of any one of embodiments 429-472, an AAV particle comprising the capsid variant of any one of embodiments 1-420 or 428, an AAV particle comprising the peptide of any one of embodiments 423-425 or 428.
[1058] 492. A method of treating a subject having or diagnosed with having a neurological disorder, e.g., a neurodegenerative disorder, comprising administering to the subject an effective amount of the pharmaceutical composition of embodiment 482, the AAV particle of any one of embodiments 429-472, an AAV particle comprising the capsid variant of any one of embodiments 1-420 or 428, an AAV particle comprising the peptide of any one of embodiments 423-425 or 428.
[1059] 493. A method of treating a subject having or diagnosed with having a muscular disorder or a neuromuscular disorder, comprising administering to the subject an effective amount of the pharmaceutical composition of embodiment 482, the AAV particle of any one of embodiments 429-472, an AAV particle comprising the capsid variant of any one of embodiments 1-420 or 428, an AAV particle comprising the peptide of any one of embodiments 423-425 or 428.
[1060] 494. A method of treating a subject having or diagnosed with having a neuro-oncological disorder, comprising administering to the subject an effective amount of the pharmaceutical composition of embodiment 482, the AAV particle of any one of embodiments 429-472, an AAV particle comprising the capsid variant of any one of embodiments 1-420 or 428, an AAV particle comprising the peptide of any one of embodiments 423-425 or 428.
[1061] 495. The method of any one of embodiments 487-494, wherein the genetic disorder, neurological disorder, neurodegenerative disorder, muscular disorder, neuromuscular disorder, or neuro-oncological disorder is Huntington's Disease, Amyotrophic Lateral Sclerosis (ALS), Gaucher Disease, Dementia with Lewy Bodies, Parkinson's disease, Spinal Muscular Atrophy, Alzheimer's Disease, or a cancer (e.g., a HER2/neu positive cancer or a glioblastoma).
[1062] 496. The method of any one of embodiments 491-495, where treating comprises prevention of progression of the disease or disorder in the subject.
[1063] 497. The method of any one of embodiments 486-496, wherein the subject is a human.
[1064] 498. The method of any one of embodiments 491-497, wherein the AAV particle is administered to the subject intravenously, via intra-cisterna magna injection (ICM), intracerebrally, intrathecally, intracerebroventricularly, via intraparenchymal administration, or intramuscularly.
[1065] 499. The method of any one of embodiments 491-498, wherein the AAV particle is administered to the subject via focused ultrasound (FUS), e.g., coupled with the intravenous administration of microbubbles (FUS-MB), or MRI-guided FUS coupled with intravenous administration.
[1066] 500. The method of any one of embodiments 491-498, wherein the AAV particle is administered to the subject intravenously.
[1067] 501. The method of any one of embodiments 491-500, wherein administration of the AAV particle results in a decreased presence, level, and/or activity of a gene, mRNA, protein, or combination thereof.
[1068] 502. The method of any one of embodiments 491-501, wherein administration of the AAV particle results in an increased presence, level, and/or activity of a gene, mRNA, protein, or a combination thereof.
[1069] 503. The method of any one of embodiments 491-502, wherein the AAV particle is administered at a dose of about 6.7e11 VG/kg to 2e13 VG/kg (e.g., 6.7e11 VG/kg, 2e12 VG/kg, 6.7e12 VG/kg, or 2e13 VG/kg) or about 5e11 VG/kg to 3e13 VG/kg.
[1070] 504. The method of any one of embodiments 491-503, wherein the AAV particle is administered at a dose of about 6.7e10 VG/kg to 6.7e12 VG/kg, about 1.3e11 VG/kg to 3.4e12 VG/kg, or about 2.2e11 VG/kg to 2e12 VG/kg.
[1071] 505. The method of any one of embodiments 491-277, wherein the AAV particle is administered at a dose of about 4e11 VG/kg to 8e11 VG/kg (e.g., about 6.7e11 VG/kg).
[1072] 506. The method of any one of embodiments 491-277, wherein the AAV particle is administered at a dose of about 6.7e11 VG/kg.
[1073] 507. The method of any one of embodiments 491-277, wherein the AAV particle is administered at a dose of about 2e11 VG/kg to 2e13 VG/kg, about 4e11 VG/kg to 1e13 VG/kg, about 6.7e11 VG/kg to about 6e12 VG/kg.
[1074] 508. The method of any one of embodiments 491-277, wherein the AAV particle is administered at a dose of about 1e12 VG/kg to 5e12 VG/kg (e.g., about 2e12 VG/kg).
[1075] 509. The method of any one of embodiments 491-277, wherein the AAV particle is administered at a dose of about 2e12 VG/kg.
[1076] 510. The method of any one of embodiments 491-277, wherein the AAV particle is administered at a dose of about 6.7e11 VG/kg to 6.7e13 VG/kg, about 1.3e12 VG/kg to 3.4e13 VG/kg, or about 2.2e12 VG/kg to 2e13 VG/kg.
[1077] 511. The method of any one of embodiments 491-277, wherein the AAV particle is administered at a dose of about 4e12 VG/kg to 8e12 VG/kg (e.g., about 6.7e12 VG/kg).
[1078] 512. The method of any one of embodiments 491-277, wherein the AAV particle is administered at a dose of about 6.7e12 VG/kg.
[1079] 513. The method of any one of embodiments 491-277, wherein the AAV particle is administered at a dose of about 2e12 VG/kg to 2e14 VG/kg, about 4e12 VG/kg to 1e14 VG/kg, about 6.7e12 VG/kg to about 6e13 VG/kg.
[1080] 514. The method of any one of embodiments 491-277, wherein the AAV particle is administered at a dose of about 1e13 VG/kg to 5e13 VG/kg (e.g., about 2e13 VG/kg).
[1081] 515. The method of any one of embodiments 491-514, wherein the AAV particle is administered at a dose of about 2e13 VG/kg.
[1082] 516. The method of any one of embodiments 503-515, wherein the AAV particle comprises a viral genome which is single stranded.
[1083] 517. The method of any one of embodiments 503-516, wherein the AAV particle is administered intravenously.
[1084] 518. The method of any one of embodiments 503-517, wherein administration of the AAV particle at a dose of 2e13 VG/kg is capable of transducing greater than 40% of total cells in brain region chosen from a thalamus, caudate, or putamen, and greater than 20% total cells in a brain region chosen from a entorhinal cortex, auditory cortex, or hippocampus, e.g., when measured by an assay described in Example 10.
[1085] 519. The method of any one of embodiments 503-518, wherein administration of the AAV particle at a dose of 6.7e12 VG/kg is capable of transducing greater than 20% of total cells in brain region chosen from a thalamus, caudate, putamen, or cerebellum, e.g., when measured by an assay described in Example 10.
[1086] 520. The method of any one of embodiments 503-519, wherein administration of the AAV particle at a dose of 2e13 VG/kg is capable of transducing greater than 90% SMI311-positive neurons in the thalamus, dentate and spinal cord, e.g., when measured by an assay described in Example 10.
[1087] 521. The method of any one of embodiments 503-520, wherein administration of the AAV particle at a dose of 2e12 VG/kg is capable of expressing transgene mRNA at a supraphysiological level, e.g., when measured by an assay described in Example 10.
[1088] 522. The method of any one of embodiments 503-521, wherein administration of the AAV particle at a dose of 2e12 VG/kg is capable of transducing multiple regions of the central nervous system (e.g., one or more regions of the brain and/or spinal cord), e.g., when measured by an assay described in Example 10.
[1089] 523. The pharmaceutical composition of embodiment 482, the AAV particle of any one of embodiments 429-472, an AAV particle comprising the capsid variant of any one of embodiments 1-420 or 428, an AAV particle comprising the peptide of any one of embodiments 423-425 or 428, for use in a method of delivering a payload to a cell or tissue.
[1090] 524. The pharmaceutical composition of embodiment 482, the AAV particle of any one of embodiments 429-472, an AAV particle comprising the capsid variant of any one of embodiments 1-420 or 428, an AAV particle comprising the peptide of any one of embodiments 423-425 or 428, for use in a method of treating a genetic disorder, a neurological disorder, a neurodegenerative disorder, a muscular disorder, a neuromuscular disorder, or a neuro-oncological disorder.
[1091] 525. The pharmaceutical composition of embodiment 482, the AAV particle of any one of embodiments 429-472, an AAV particle comprising the capsid variant of any one of embodiments 1-420 or 428, an AAV particle comprising the peptide of any one of embodiments 423-425 or 428, for use in the manufacture of a medicament.
[1092] 526. Use of the pharmaceutical composition of embodiment 482, the AAV particle of any one of embodiments 429-472, an AAV particle comprising the capsid variant of any one of embodiments 1-420 or 428, an AAV particle comprising the peptide of any one of embodiments 423-425 or 428, in the manufacture of a medicament.
[1093] 527. Use of the pharmaceutical composition of embodiment 482, the AAV particle of any one of embodiments 429-472, an AAV particle comprising the capsid variant of any one of embodiments 1-420 or 428, an AAV particle comprising the peptide of any one of embodiments 423-425 or 428, in the manufacture of a medicament for treating a genetic disorder, a neurological disorder, a neurodegenerative disorder, a muscular disorder, a neuromuscular disorder, or a neuro-oncological disorder.
[1094] 528. A pharmaceutical formulation comprising: (i) an AAV particle or variant thereof, e.g., an AAV particle comprising an AAV capsid variant as described herein (e.g., the AAV particle of any one of embodiments 429-472 of the enumerated embodiments, an AAV particle comprising the capsid variant of any one of embodiments 1-420 or 428 of the enumerated embodiments, an AAV particle comprising the peptide of any one of embodiments 423-425 or 428 of the enumerated embodiments; or the AAV particle of any one of embodiments 124-152 of the additional enumerated embodiments, an AAV particle comprising the capsid variant of any one of embodiments 1-102 or 108 of the additional enumerated embodiments, or an AAV particle comprising the peptide of embodiment 107 of the additional enumerated embodiments); (ii) a buffering agent; and (iii) a polyether, e.g., one or more polyethers (e.g., glycerol, glycerin, and polyethylene glycol (e.g., low-molecular-weight PEG)).
[1095] 529. A pharmaceutical formulation comprising:
   [1096] (i) the AAV particle of any one of embodiments 429-472 of the enumerated embodiments, an AAV particle comprising the capsid variant of any one of embodiments 1-420 or 428 of the enumerated embodiments, an AAV particle comprising the peptide of any one of embodiments 423-425 or 428 of the enumerated embodiments; or the AAV particle of any one of embodiments 124-152 of the additional enumerated embodiments, an AAV particle comprising the capsid variant of any one of embodiments 1-102 or 108 of the additional enumerated embodiments, or an AAV particle comprising the peptide of embodiment 107 of the additional enumerated embodiments;
   [1097] (ii) a buffering agent (e.g., a tris base); and
   [1098] (iii) a polyether (e.g., glycerol, glycerin, and polyethylene glycol (e.g., low-molecular-weight PEG)).
[1099] 530. A pharmaceutical formulation comprising: (i) an AAV particle or variant thereof, e.g., an AAV particle comprising an AAV capsid variant as described herein (e.g., the AAV particle of any one of embodiments 429-472 of the enumerated embodiments, an AAV particle comprising the capsid variant of any one of embodiments 1-420 or 428 of the enumerated embodiments, an AAV particle comprising the peptide of any one of embodiments 423-425 or 428 of the enumerated embodiments; or the AAV particle of any one of embodiments 124-152 of the additional enumerated embodiments, an AAV particle comprising the capsid variant of any one of embodiments 1-102 or 108 of the additional enumerated embodiments, or an AAV particle comprising the peptide of embodiment 107 of the additional enumerated embodiments), (ii) a buffering agent (e.g., a tris base), and (iii) a sugar, e.g., trehalose, sucrose, lactulose, lactose, maltose, cellobiose, chitobiose, kojibiose, nigerose, isomaltose, β,β-trehalose, α,β-trehalose, sophorose, laminaribiose, gentiobiose, turanose, maltulose, palatinose, gentiobiulose, mannobiose, melibiose, melibiulose, rutinose, rutinulose, or xylobiose.
[1100] 531. A pharmaceutical formulation comprising:
   [1101] (i) the AAV particle of any one of embodiments 429-472 of the enumerated embodiments, an AAV particle comprising the capsid variant of any one of embodiments 1-420 or 428 of the enumerated embodiments, an AAV particle comprising the peptide of any one of embodiments 423-425 or 428 of the enumerated embodiments; or the AAV particle of any one of embodiments 124-152 of the additional enumerated embodiments, an AAV particle comprising the capsid variant of any one of embodiments 1-102 or 108 of the additional enumerated embodiments, or an AAV particle comprising the peptide of embodiment 107 of the additional enumerated embodiments;
   [1102] (ii) a buffering agent (e.g., a tris base); and
   [1103] (iii) a sugar, e.g., trehalose, sucrose, lactulose, lactose, maltose, cellobiose, chitobiose, kojibiose, nigerose, isomaltose, β,β-trehalose, α,β-trehalose, sophorose, laminaribiose, gentiobiose, turanose, maltulose, palatinose, gentiobiulose, mannobiose, melibiose, melibiulose, rutinose, rutinulose, or xylobiose.
[1104] 532. The pharmaceutical formulation of any one of embodiments 528-531, further comprising a salt.
[1105] 533. The pharmaceutical formulation of any one of embodiments 528-532, further comprising a surfactant.
[1106] 534. A pharmaceutical formulation comprising: (a) an AAV particle comprising an AAV capsid variant, e.g., an AAV capsid variant described herein (e.g., the AAV particle of any one of embodiments 429-472 of the enumerated embodiments, an AAV particle comprising the capsid variant of any one of embodiments 1-420 or 428 of the enumerated embodiments, an AAV particle comprising the peptide of any one of embodiments 423-425 or 428 of the enumerated embodiments; or the AAV particle of any one of embodiments 124-152 of the additional enumerated embodiments, an AAV particle comprising the capsid variant of any one of embodiments 1-102 or 108 of the additional enumerated embodiments, or an AAV particle comprising the peptide of embodiment 107 of the additional enumerated embodiments); (b) a buffering agent; (c) a polyether; (d) a salt; and (e) a surfactant.
[1107] 535. A pharmaceutical formulation comprising:
   [1108] (i) the AAV particle of any one of embodiments 429-472 of the enumerated embodiments, an AAV particle comprising the capsid variant of any one of embodiments 1-420 or 428 of the enumerated embodiments, an AAV particle comprising the peptide of any one of embodiments 423-425 or 428 of the enumerated embodiments; or the AAV particle of any one of embodiments 124-152 of the additional enumerated embodiments, an AAV particle comprising the capsid variant of any one of embodiments 1-102 or 108 of the additional enumerated embodiments, or an AAV particle comprising the peptide of embodiment 107 of the additional enumerated embodiments;
   [1109] (ii) a buffering agent (e.g., a tris base);
   [1110] (iii) a polyether (e.g., glycerol, glycerin, and polyethylene glycol (e.g., low-molecular-weight PEG));
   [1111] (iv) a salt (e.g., sodium chloride, potassium chloride, or magnesium chloride); and
   [1112] (v) a surfactant (e.g., an ethylene oxide/propylene oxide copolymer (e.g., poloxamers such as Pluronic® F-68 or F-127)), or a zwitterionic surfactant, wherein the concentration of the surfactant, e.g., Pluronic F-68, is between 0.0005-0.0015% (e.g., 0.0008-0.0012%, e.g., 0.001% or about 0.001%)).
[1113] 536. A pharmaceutical formulation comprising (a) an AAV particle comprising an AAV capsid variant, e.g., an AAV capsid variant described herein (e.g., the AAV particle of any one of embodiments 429-472 of the enumerated embodiments, an AAV particle comprising the capsid variant of any one of embodiments 1-420 or 428 of the enumerated embodiments, an AAV particle comprising the peptide of any one of embodiments 423-425 or 428 of the enumerated embodiments; or the AAV particle of any one of embodiments 124-152 of the additional enumerated embodiments, an AAV particle comprising the capsid variant of any one of embodiments 1-102 or 108 of the additional enumerated embodiments, or an AAV particle comprising the peptide of embodiment 107 of the additional enumerated embodiments); (b) a buffering agent; (c) a sugar; (d) a salt; and (e) a surfactant.
[1114] 537. A pharmaceutical formulation comprising:
   [1115] (i) the AAV particle of any one of embodiments 429-472 of the enumerated embodiments, an AAV particle comprising the capsid variant of any one of embodiments 1-420 or 428 of the enumerated embodiments, an AAV particle comprising the peptide of any one of embodiments 423-425 or 428 of the enumerated embodiments; or the AAV particle of any one of embodiments 124-152 of the additional enumerated embodiments, an AAV particle comprising the capsid variant of any one of embodiments 1-102 or 108 of the additional enumerated embodiments, or an AAV particle comprising the peptide of embodiment 107 of the additional enumerated embodiments;
   [1116] (ii) a buffering agent (e.g., a tris base);
   [1117] (iii) a sugar (e.g., trehalose, sucrose, lactulose, lactose, maltose, cellobiose, chitobiose, kojibiose, nigerose, isomaltose, β,β-trehalose, α,β-trehalose, sophorose, laminaribiose, gentiobiose, turanose, maltulose, palatinose, gentiobiulose, mannobiose, melibiose, melibiulose, rutinose, rutinulose, or xylobiose);
   [1118] (iv) a salt (e.g., sodium chloride, potassium chloride, or magnesium chloride); and
   [1119] (v) a surfactant (e.g., an ethylene oxide/propylene oxide copolymer (e.g., poloxamers such as Pluronic® F-68 or F-127)), or a zwitterionic surfactant, wherein the concentration of the surfactant, e.g., Pluronic F-68, is between 0.0005-0.0015% (e.g., 0.0008-0.0012%, e.g., 0.001% or about 0.001%)).
[1120] 538. The pharmaceutical formulation of any one of embodiments 528-537, wherein the buffering agent is capable of maintaining a pH of 7.8-8.4 (e.g., 7.8, 7.9, 8.0, 8.1, 8.2, 8.3, or 8.4).
[1121] 539. The pharmaceutical formulation of any one of embodiments 528-538, wherein the buffering agent is chosen from a Tris base, Tris HCl, Bis-tris propane (BTP), phosphate-buffered saline (PBS), sodium phosphate (monosodium phosphate and/or disodium phosphate), potassium phosphate (monopotassium phosphate and/or dipotassium phosphate), histidine, boric acid, citric acid, glycine, HEPES (4-(2-hydroxyethyl)-1-piperazineethanesulfonic acid), or MOPS (3-(N-morpholino)propanesulfonic acid).
[1122] 540. The pharmaceutical formulation of any one of embodiments 528-539, wherein the buffering agent is Tris.
[1123] 541. The pharmaceutical formulation of any one embodiments 528, 529, 532-535, or 538-450, wherein the polyether is chosen from glycerol, glycerin, or polyethylene glycol (e.g., low-molecular-weight PEG).
[1124] 542. The pharmaceutical formulation of any one of embodiments 528, 529, 532-535, or 538-541, wherein the polyether is glycerol.
[1125] 543. The pharmaceutical formulation of any one of embodiments 528, 529, 532-535, or 538-541, wherein the polyether is polyethylene glycol (e.g., low-molecular-weight PEG).
[1126] 544. The pharmaceutical formulation of any one of embodiments 528, 529, 532-535, or 538-543, wherein the polyether is present at a concentration between:
   [1127] (i) about 0.5-5% (e.g., 0.5-3%, 0.5-1.5% (e.g., 0.75-1.25%, e.g., 1%, or about 1%), or 2-3% (e.g., 2.3-2.7%, e.g., 2.5% or about 2.5%));
   [1128] (ii) about 0.5-1.5% (e.g., 0.75-1.25%, e.g., 1% or about 1%);
   [1129] (iii) about 2-3% (e.g., 2.3-2.7%, e.g., 2.5% or about 2.5%); or
   [1130] (iv) about 3-5%.
[1131] 545. The pharmaceutical formulation of any one of embodiments 528, 529, 532-535, or 538-544, wherein the polyether is present at a concentration of 1%.
[1132] 546. The pharmaceutical formulation of any one of embodiments 528, 592, 532-535, or 538-544, wherein the polyether is present at a concentration of 2.5%.
[1133] 547. The pharmaceutical formulation of any one of embodiments 530-533, or 536-540, wherein the sugar is chosen from trehalose, sucrose, lactulose, lactose, maltose, cellobiose, chitobiose, kojibiose, nigerose, isomaltose, β,β-trehalose, α,β-trehalose, sophorose, laminaribiose, gentiobiose, turanose, maltulose, palatinose, gentiobiulose, mannobiose, melibiose, melibiulose, rutinose, rutinulose, or xylobiose.
[1134] 548. The pharmaceutical composition of any one of embodiments 530-533, 536-540, or 457, wherein the sugar is trehalose.
[1135] 549. The pharmaceutical composition of any one of embodiments 530-533, 536-540, 457, or 458, wherein the sugar is present:
   [1136] (i) at a concentration between about 5.5-6.5% (e.g., 5.8-6.2%, e.g., 5.95% or about 5.95%); or
   [1137] (ii) at a concentration of 5.95%.
[1138] 550. The pharmaceutical formulation of any one of embodiments 532-549, wherein the salt is chosen from sodium chloride, potassium chloride, or magnesium chloride.
[1139] 551. The pharmaceutical formulation of any one of embodiments 532-550, wherein the salt is sodium chloride.
[1140] 552. The pharmaceutical formulation of any one of embodiments 532-551, wherein the salt is present:
   [1141] (i) at a concentration between about 55-70 mM (e.g., 60-65 mM, e.g., 62.5 mM, or about 62.5 mM); or
   [1142] (ii) at a concentration of 62.5 mM.
[1143] 553. The pharmaceutical formulation of any one of embodiments 533-552, wherein the surfactant chosen from:
   [1144] (a) an anionic surfactant (e.g., sulfate, sulfonate, phosphate esters, and carboxylates);
   [1145] (b) a non-ionic surfactant (e.g., ehoxylates, fatty alcohol ethoxylates, alkylphenol ethoxylates (e.g., nonoxynols, Triton X-100), fatty acid ethoxylates, ethoxylated amines and/or fatty acid amides (e.g., polyethoxylated tallow amine, cocamide monoethanolamine, cocamide diethanolamine), ethylene oxide/propylene oxide copolymer (e.g., poloxamers such as Pluronic® F-68 or F-127), esters of fatty acids and polyhydric alcohols, fatty acid alkanolamides, ethoxylated aliphatic acids, ethoxylated aliphatic alcohols, ethoxylated sorbitol fatty acid esters, ethoxylated glycerides, ethoxylated block copolymers with EDTA (ethylene diaminetetraacetic acid), ethoxylated cyclic ether adducts, ethoxylated amide and imidazoline adducts, ethoxylated amine adducts, ethoxylated mercaptan adducts, ethoxylated condensates with alkyl phenols, ethoxylated nitrogen-based hydrophobes, ethoxylated polyoxypropylenes, polymeric silicones, fluorinated surfactants, and polymerizable surfactants); and/or
   [1146] (c) a zwitterionic surfactant (e.g., alkylamido betaines and amine oxides thereof, alkyl betaines and amine oxides thereof, sulfo betaines, hydroxy sulfo betaines, amphoglycinates, amphopropionates, balanced amphopolycarboxyglycinates, and alkyl polyaminoglycinates).
[1147] 554. The pharmaceutical formulation of any one of embodiments 533-553, wherein the surfactant is Pluronic F-68.
[1148] 555. The pharmaceutical formulation of any one of embodiments 533-554, wherein the surfactant is present:
   [1149] (i) at a concentration between 0.0005-0.0015% (e.g., 0.0008-0.0012%, e.g., 0.001% or about 0.001%); or
   [1150] (ii) at a concentration of 0.001%.
[1151] 556. The pharmaceutical formulation of any one of embodiments 528, 529, 532-535, 538-547, or 550-555, which comprises at least two, three, or four polyethers.
[1152] 557. The pharmaceutical formulation of any one of embodiments 530-533, 536-540, or 547-555, which comprises at least two, three, or four sugars.
[1153] 558. The pharmaceutical formulation of any one of embodiments 532-557, which comprises at least two, three, or four salts.
[1154] 559. The pharmaceutical formulation of any one of embodiments 533-558, which comprises at least two, three or four surfactants.
[1155] 560. The pharmaceutical formulation of any one of embodiments 528-559, which exhibits 1, 2, 3, 4, 5, 6, 7, or all of the following properties:
   [1156] (a) a pH in the range of between 6-9, for example, a pH of about 6.0, about 6.2, about 6.4, about 6.6, about 6.8, about 7.0, about 7.2, about 7.4, about 7.6, about 7.8, about 8.0, about 8.1, about 8.2, about 8.3, about 8.4, about 8.5, about 8.6, about 8.7, about 8.8, about 8.9, about 9.0, 6.0-8.5, 6.0-7.5, 6.0-7.0, 6.0-6.5, 6.5-9.0, 6.5-8.5, 6.5-8.0, 6.5-7.5, 6.5-7.0, 7.0-9.0, 7.0-8.5, 7.0-8.0, 7.0-7.5, 7.5-9.0, 7.5-8.5, 7.5-8.0, 8.0-9.0, 8.0-8.9, 8.0-8.8, 8.0-8.7, 8.0-8.6, 8.0-8.5, 8.0-8.4, 8.0-8.3, 8.0-8.2, 8.0-8.1, 7.8-8.5, 7.9-8.3, or 7.9-8.2, as assessed by, e.g., a pH meter, as described in Example 9;
   [1157] (b) osmolality (mOsm/kg) in the range of between 250-650, for example, 250-650, 250-600, 250-550, 250-500, 250-450, 250-400, 250-350, 250-300, 300-650, 300-600, 300-550, 300-500, 300-450, 300-400, 300-350, 350-650, 350-600, 350-550, 350-500, 350-450, 350-400, 400-650, 400-600, 400-550, 400-500, 400-450, 450-650, 450-600, 450-550, 450-500, 500-650, 500-600, 500-550, 550-650, 550-600, 310-400, 320-400, 330-400, 340-400, 350-400, 360-400, 370-400, 380-400, 390-400, 300-390, 300-380, 300-370, 300-360, 300-350, 300-340, 300-330, 300-320, or 300-310, as assessed by, e.g., an osmometer as described in Example 9. as assessed by, e.g., an osmometer as described in Example 9;
   [1158] (c) a viral titer (e.g., TTD-001 titer)>1×10¹² vg/ml, for example, >2×10¹² vg/ml, >4×10¹² vg/ml, >6×10¹² vg/ml, >8×10¹² vg/ml, >1.0×10¹³ vg/ml, >1.5×10¹³ vg/ml, >2.0×10¹³ vg/ml, >2.5×10¹³ vg/ml, >3.0×10¹³ vg/ml, >3.5×10¹³ vg/ml, >4.0×10¹³ vg/ml, >4.5×10¹³ vg/ml, >5.0×10¹³ vg/ml, >5.5×10¹³ vg/ml, >6.0×10¹³ vg/ml, >6.5×10¹³ vg/ml, >7.0×10¹³ vg/ml, >7.5×10¹³ vg/ml, >8.0×10¹³ vg/ml, >8.5×10¹³ vg/ml, >9.0×10¹³ vg/ml, >9.5×10¹³ vg/ml, >1.0×10¹⁴ vg/ml, 1.0×10¹²-1.0×10¹⁴ vg/ml, 2×10¹²-1.0×10¹⁴ vg/ml, 4.0×10¹²-1.0×10¹⁴ vg/ml, 6.0×10¹²-1.0×10¹⁴ vg/ml, 8.0×10¹²-1.0×10¹⁴ vg/ml, 1.0×10¹³-1.0×10¹⁴ vg/ml, 1.5×10¹³-1.0×10¹⁴ vg/ml, 2.0×10¹³-1.0×10¹⁴ vg/ml, 2.5×10¹³-1.0×10¹⁴ vg/ml, 3.0×10¹³-1.0×10¹⁴ vg/ml, 3.5×10¹³-1.0×10¹⁴ vg/ml, 4.0×10¹³-1.0×10¹⁴ vg/ml, 4.5×10¹³-1.0×10¹⁴ vg/ml, 5.0×10¹³-1.0×10¹⁴ vg/ml, 6.0×10¹³-1.0×10¹⁴ vg/ml, 7.0×10¹³-1.0×10¹⁴ vg/ml, 8.0×10¹³-1.0×10¹⁴ vg/ml, 9.0×10¹³-1.0×10¹⁴ vg/ml, 1.0×10¹³-9.0×10¹³ vg/ml, 1.0×10¹³-8.0×10¹³ vg/ml, 1.0×10¹³-7.0×10¹³ vg/ml, 1.0×10¹³-6.0×10¹³ vg/ml, 1.0×10¹³-5.0×10¹³ vg/ml, 1.0×10¹³-4.5×10¹³ vg/ml, 1.0×10¹³-4.0×10¹³ vg/ml, 1.0×10¹³-3.5×10¹³ vg/ml, 1.0×10¹³-3.0×10¹³ vg/ml, 1.0×10¹³-2.5×10¹³ vg/ml, 1.0×10¹³-2.0×10¹³ vg/ml, or 1.0×10¹³-1.5×10¹³ vg/ml, as assessed by, e.g., qPCR as described in Example 9;
   [1159] (d) occupancy (% full capsids)≥30%, for example, ≥35%, ≥40%, ≥45%, ≥50%, ≥55%, ≥60%, ≥65%, ≥70%, ≥75%, ≥80%, ≥85%, ≥90%, ≥95%, 30%-90%, 30%-80%, 30%-70%, 30%-65%, 30%-60%, 30%-55%, 30%-50%, 30%-45%, 30%-40%, 30%-35%, 35%-90%, 35%-80%, 35%-75%, 35%-70%, 35%-65%, 35%-60%, 35%-55%, 35%-50%, 35%-45%, 35%-40%, 40%-90%, 40%-80%, 40%-70%, 40%-65%, 40%-60%, 40%-55%, 40%-50%, 40%-45%, 45%-90%, 45%-80%, 45%-70%, 45%-65%, 45%-60%, 45%-55%, 45%-50%, 50%-90%, 50%-80%, 50%-70%, 50%-65%, 50%-60%, 50%-55%, 55%-90%, 55%-80%, 55%-70%, 55%-65%, 55%-60%, 60%-90%, 60%-80%, 60%-70%, 70%-90%, 70%-80%, or 80%-90%, as assessed by, e.g., SEC-MALS as described in Example 9;
   [1160] (e) aggregation≤10%, for example, ≤9%, ≤8%, ≤7%, ≤6%, ≤5%, ≤4%, ≤3%, ≤2%, ≤1%, 0-10%, 0-8%, 0-6%, 0-5%, 0-4%, 0-3%, 0-2%, 0-1%, 1-10%, 2-10%, 3-10%, 4-10%, 5-10%, 1-5%, 2-5%, or 3-5%, as assessed by % HMW using size exclusion chromatography (SEC), for example, SEC-FLD/DLS or SEC-MALS, as described in Example 9;
   [1161] (f) a viral titer higher than the viral titer supported by a formulation comprising PBS and 0.001% Pluronic F68 (modified PBS formulation) (e.g., higher by at least 50%, at least 100%, at least 250%, at least 500%, at least 750%, at least 1000% (e.g., one order of magnitude), at least 2000%, at least 4000%, at least 6000%, at least 8000%, at least 10,000% (e.g., two orders of magnitude), at least 25,000%, at least 50,000%, 500-50,000%, 1000-50,000%, 2500-50,000%, 5000-50,000%, 7500-50,000%, 10,000-50,000%, 25,000-50,000%, 500-25,000%, 1000-25,000%, 2500-25,000%, 5000-25,000%, 7500-25,000%, 10,000-25,000%, 500-10,000%, 1000-10,000%, 2500-10,000%, 5000-10,000%, 7500-10,000%, 500-7500%, 1000-7500%, 2500-7500%, 5000-7500%, 500-5000%, 1000-7500%, or 2500-5000%), as assessed by, e.g., qPCR as described in Example 9;
   [1162] (g) occupancy (% full capsids) higher than the occupancy supported by a formulation comprising PBS and 0.001% Pluronic F68 (modified PBS formulation) (e.g., higher relative to the modified PBS formulation by, e.g., ≥10%, ≥15%, ≥20%, ≥25%, ≥30%, ≥35%, ≥40%, ≥45%, ≥50%, ≥55%, ≥60%, ≥65%, ≥70%, ≥75%, ≥80%, ≥85%, ≥90%, ≥95%, ≥100% (e.g., at least 2-times higher), ≥125%, ≥150%, 10-150%, 20-150%, 30-150%, 40-150%, 50-150%, 60-150%, 70-150%, 80-150%, 90-150%, 100-150%, 125-150%, 10-125%, 20-125%, 30-125%, 40-125%, 50-125%, 60-125%, 70-125%, 80-125%, 90-125%, 100-125%, 10-100%, 20-100%, 30-100%, 40-100%, 50-100%, 60-100%, 70-100%, 80-100%, 90-100%, 10-75%, 20-75%, 30-75%, 40-75%, 50-75%, 60-75%, 10-50%, 20-50%, 30-50%, 40-50%, or 10-25%), as assessed by, e.g., SEC-MALS as described in Example 9; and/or
   [1163] (h) aggregation less than the aggregation observed with a formulation comprising PBS and 0.001% Pluronic F68 (modified PBS formulation) after multiple freeze thaw cycles (e.g., 1, 2, 3, 4, 5, 6, or more freeze thaw cycles), e.g., aggregation less than that observed with the modified PBS formulation after 1, 2, 3, 4, 5, 6, or more freeze thaw cycles by at least 20%, 25%, 30%, 35%, 40%, 45%, 50%, 55%, 60%, 65%, 70%, 75%, 80%, 85%, 90%, 20-90%, 30-90%, 40-90%, 50-90%, 60-90%, 70-90%, 80-90%, 20-80%, 30-80%, 40-80%, 50-80%, 60-80%, 70-80%, 20-70%, 30-70%, 40-70%, 50-70%, 60-70%, 20-60%, 30-60%, 40-60%, 50-60%, 20-50%, 30-50%, 40-50%, 20-40%, 30-40%, or 20-30%, as assessed by % HMW using size exclusion chromatography (SEC), for example, SEC-FLD/DLS or SEC-MALS, as described in Example 9.
[1164] 561. The pharmaceutical formulation of any one of embodiments 528, 529, 532-535, 538-547, 550-560, which comprises (a) an AAV particle or variant thereof, e.g., an AAV particle comprising an AAV capsid variant as described herein, e.g., the AAV particle of any one of embodiments 429-472 of the enumerated embodiments, an AAV particle comprising the capsid variant of any one of embodiments 1-420 or 428 of the enumerated embodiments, an AAV particle comprising the peptide of any one of embodiments 423-425 or 428 of the enumerated embodiments; or the AAV particle of any one of embodiments 124-152 of the additional enumerated embodiments, an AAV particle comprising the capsid variant of any one of embodiments 1-102 or 108 of the additional enumerated embodiments, or an AAV particle comprising the peptide of embodiment 107 of the additional enumerated embodiments; (b) Tris; (c) glycerol; (d) sodium chloride; and (e) Pluronic F-68.
[1165] 562. The pharmaceutical formulation of any one of embodiments 530-533, 536-540, 547-555, or 557-560, which comprises (a) an AAV particle or variant thereof, e.g., an AAV particle comprising an AAV capsid variant as described herein, e.g., the AAV particle of any one of embodiments 429-472 of the enumerated embodiments, an AAV particle comprising the capsid variant of any one of embodiments 1-420 or 428 of the enumerated embodiments, an AAV particle comprising the peptide of any one of embodiments 423-425 or 428 of the enumerated embodiments; or the AAV particle of any one of embodiments 124-152 of the additional enumerated embodiments, an AAV particle comprising the capsid variant of any one of embodiments 1-102 or 108 of the additional enumerated embodiments, or an AAV particle comprising the peptide of embodiment 107 of the additional enumerated embodiments; (b) Tris; (c) trehalose; (d) sodium chloride; and (e) Pluronic F-68.
[1166] 563. The pharmaceutical formulation of embodiment 561 or 562, wherein the concentration of Tris is between 10-30 mM (e.g., 15-25 mM, e.g., 20 mM or about 20 mM).
[1167] 564. The pharmaceutical formulation of embodiment 561 or 563, wherein the concentration of glycerol is between 0.5-1.5% (e.g., 0.75-1.25%, e.g., 1% or about 1%).
[1168] 565. The pharmaceutical formulation of embodiment 561 or 563, wherein the concentration of glycerol is between 2-3% (e.g., 2.3-2.7%, e.g., 2.5% or about 2.5%).
[1169] 566. The pharmaceutical formulation of embodiment 562 or 563, wherein the concentration of trehalose is between 5.5-6.5% (e.g., 5.8-6.2%, e.g., 5.95% or about 5.95%).
[1170] 567. The pharmaceutical formulation of any one of embodiments 561-566, wherein the concentration of sodium chloride is between 55-70 mM (e.g., 60-65 mM, e.g., 62.5 mM or about 62.5 mM).
[1171] 568. The pharmaceutical formulation of embodiment 561-567, wherein the concentration of Pluronic F-68 is between 0.0005-0.0015% (e.g., 0.0008-0.0012%, e.g., 0.001% or about 0.001%).
[1172] 569. A pharmaceutical formulation comprising:
   [1173] (i) the AAV particle of any one of embodiments 429-472 of the enumerated embodiments, an AAV particle comprising the capsid variant of any one of embodiments 1-420 or 428 of the enumerated embodiments, an AAV particle comprising the peptide of any one of embodiments 423-425 or 428 of the enumerated embodiments; or the AAV particle of any one of embodiments 124-152 of the additional enumerated embodiments, an AAV particle comprising the capsid variant of any one of embodiments 1-102 or 108 of the additional enumerated embodiments, or an AAV particle comprising the peptide of embodiment 107 of the additional enumerated embodiments;
   [1174] (ii) a buffering agent, e.g., a Tris base, capable of maintaining a pH of 7.8-8.4 (e.g., 7.8, 7.9, 8.0, 8.1, 8.2, 8.3, or 8.4), wherein the concentration of the buffering agent is between 10-30 mM (e.g., 15-25 mM, e.g., 20 mM or about 20 mM);
   [1175] (iii) a polyether, e.g., glycerol, glycerin, or polyethylene glycol (e.g., low-molecular-weight PEG), wherein the concentration of the polyether, e.g., glycerol, is between 0.5-5% (e.g., 0.5-3%, 0.5-1.5% (e.g., 0.75-1.25%, e.g., 1%, or about 1%), or 2-3% (e.g., 2.3-2.7%, e.g., 2.5% or about 2.5%)); (iv) a salt, e.g., sodium chloride, potassium chloride, or magnesium chloride, wherein the concentration of the salt, e.g., sodium chloride, is between 55-70 mM (e.g., 60-65 mM, e.g., 62.5 mM or about 62.5 mM); and
   [1176] (v) a surfactant, e.g., an anionic surfactant, a non-ionic surfactant (e.g., an ethylene oxide/propylene oxide copolymer (e.g., poloxamers such as Pluronic® F-68 or F-127)), or a zwitterionic surfactant, wherein the concentration of the surfactant, e.g., Pluronic F-68, is between 0.0005-0.0015% (e.g., 0.0008-0.0012%, e.g., 0.001% or about 0.001%)).
[1177] 570. A pharmaceutical formulation comprising (a) an AAV particle or variant thereof, e.g., an AAV particle comprising an AAV capsid variant as described herein, e.g., the AAV particle of any one of embodiments 429-472 of the enumerated embodiments, an AAV particle comprising the capsid variant of any one of embodiments 1-420 or 428 of the enumerated embodiments, an AAV particle comprising the peptide of any one of embodiments 423-425 or 428 of the enumerated embodiments; or the AAV particle of any one of embodiments 124-152 of the additional enumerated embodiments, an AAV particle comprising the capsid variant of any one of embodiments 1-102 or 108 of the additional enumerated embodiments, or an AAV particle comprising the peptide of embodiment 107 of the additional enumerated embodiments; (b) 20 mM or about 20 mM Tris; (c) 1% or about 1% glycerol; (d) 62.5 mM or about 62.5 mM sodium chloride; and (e) 0.001% or about 0.001% Pluronic F-68.
[1178] 571. A pharmaceutical formulation comprising:
   [1179] (i) the AAV particle of any one of embodiments 429-472 of the enumerated embodiments, an AAV particle comprising the capsid variant of any one of embodiments 1-420 or 428 of the enumerated embodiments, an AAV particle comprising the peptide of any one of embodiments 423-425 or 428 of the enumerated embodiments; or the AAV particle of any one of embodiments 124-152 of the additional enumerated embodiments, an AAV particle comprising the capsid variant of any one of embodiments 1-102 or 108 of the additional enumerated embodiments, or an AAV particle comprising the peptide of embodiment 107 of the additional enumerated embodiments;
   [1180] (ii) a buffering agent, e.g., a Tris base, capable of maintaining a pH of 7.8-8.4 (e.g., 7.8, 7.9, 8.0, 8.1, 8.2, 8.3, or 8.4), wherein the concentration of the buffering agent is between 10-30 mM (e.g., 15-25 mM, e.g., 20 mM or about 20 mM);
   [1181] (iii) a sugar, e.g., trehalose, sucrose, lactulose, lactose, maltose, cellobiose, chitobiose, kojibiose, nigerose, isomaltose, β,β-trehalose, α,β-trehalose, sophorose, laminaribiose, gentiobiose, turanose, maltulose, palatinose, gentiobiulose, mannobiose, melibiose, melibiulose, rutinose, rutinulose, or xylobiose, wherein the concentration of the sugar, e.g., trehalose, is between 5.5-6.5% (e.g., 5.8-6.2%, e.g., 5.95% or about 5.95%);
   [1182] (iv) a salt, e.g., sodium chloride, potassium chloride, or magnesium chloride, wherein the concentration of the salt, e.g., sodium chloride, is between 55-70 mM (e.g., 60-65 mM, e.g., 62.5 mM or about 62.5 mM); and
   [1183] (v) a surfactant, e.g., an anionic surfactant, a non-ionic surfactant (e.g., an ethylene oxide/propylene oxide copolymer (e.g., poloxamers such as Pluronic® F-68 or F-127), or a zwitterionic surfactant, wherein the concentration of the surfactant, e.g., Pluronic F-68, is between 0.0005-0.0015% (e.g., 0.0008-0.0012%, for example, 0.001% or about 0.001%)).
[1184] 572. A pharmaceutical formulation comprising (a) an AAV particle or variant thereof, e.g., an AAV particle comprising an AAV capsid variant as described herein, e.g., the AAV particle of any one of embodiments 429-472 of the enumerated embodiments, an AAV particle comprising the capsid variant of any one of embodiments 1-420 or 428 of the enumerated embodiments, an AAV particle comprising the peptide of any one of embodiments 423-425 or 428 of the enumerated embodiments; or the AAV particle of any one of embodiments 124-152 of the additional enumerated embodiments, an AAV particle comprising the capsid variant of any one of embodiments 1-102 or 108 of the additional enumerated embodiments, or an AAV particle comprising the peptide of embodiment 107 of the additional enumerated embodiments; (b) 20 mM or about 20 mM Tris; (c) 2.5% or about 2.5% glycerol; (d) 62.5 mM or about 62.5 mM sodium chloride; and (e) 0.001% or about 0.001% Pluronic F-68.
[1185] 573. A pharmaceutical formulation comprising (a) an AAV particle or variant thereof, e.g., an AAV particle comprising an AAV capsid variant as described herein, e.g., the AAV particle of any one of embodiments 429-472 of the enumerated embodiments, an AAV particle comprising the capsid variant of any one of embodiments 1-420 or 428 of the enumerated embodiments, an AAV particle comprising the peptide of any one of embodiments 423-425 or 428 of the enumerated embodiments; or the AAV particle of any one of embodiments 124-152 of the additional enumerated embodiments, an AAV particle comprising the capsid variant of any one of embodiments 1-102 or 108 of the additional enumerated embodiments, or an AAV particle comprising the peptide of embodiment 107 of the additional enumerated embodiments; (b) 20 mM or about 20 mM Tris; (c) 5.95% or about 5.95% trehalose; (d) 62.5 mM or about 62.5 mM sodium chloride; and (e) 0.001% or about 0.001% Pluronic F-68.
[1186] 574. The pharmaceutical formulation of any one of embodiments 528-573, wherein the formulation has a pH of between 7.8-8.4 (e.g., 7.8, 7.9, 8.0, 8.1, 8.2, 8.3, or 8.4).
[1187] 575. The pharmaceutical formulation of any one of embodiments 528-574, wherein the formulation has an osmolality of between 250-550 mOsm/kg (e.g., between 300-550, 400-550, 250-500, 300-500, 250-450, 300-450, or 300-400).
[1188] 576. The pharmaceutical formulation of any one of embodiments 528-575, wherein the formulation remains stable after storage at −80° C., 2-8° C., or room temperature for 1 day, 2 days, 3 days, 4 days, 5 days, 6 days, 1 week, 2 weeks, 3 weeks, 1 month, 2 months, 3 months, 4 months, 5 months, 6 months, or longer (e.g., one or more years), as reflected by a change (e.g., an increase or decrease) in osmolality, viral titer, occupancy, and/or aggregation, relative to baseline (e.g., prior to storage) of less than 50% (e.g., less than 40%, 30%, 20%, 10%, or 5%), e.g., as measured by an assay described herein.
[1189] 577. The pharmaceutical formulation of any one of embodiments 528-576, wherein: (a) the ratio of VP3 protein to VP2 protein (VP3:VP2) of the AAV capsids of the AAV particle is about 25-35:2 (e.g., 25-34:2, 25-33:2, 25-32:2, 25-30:2, 25:2, 26:2, 27:2, 28:2, 29:2, 30:2, 31:2, 32:2, 33:2, 34:2, or 35:2),
   [1190] (b) the ratio of VP3 protein to VP1 protein (VP3:VP1) of the AAV capsids of the AAV particle is about 25-35:1 (e.g., 25-34:1, 25-33:1, 25-32:1, 25-30:1, 25:1, 26:1, 27:1, 28:1, 29:1, 30:1, 31:1, 32:1, 33:1, 34:1, or 35:1), and/or
   [1191] (c) the ratio of VP3 protein to VP2 and VP1 proteins (VP3:VP2:VP1) of the AAV capsids of the AAV particle is about 25-35:2:1 (e.g., 25-34:2:1, 25-33:2:1, 25-32:2:1, 25-30:2:1, 25:2:1, 26:2:1, 27:2:1, 28:2:1, 29:2:1, 30:2:1, 31:2:1, 32:2:1, 33:2:1, 34:2:1, or 35:2:1), when the pharmaceutical formulation is stored at −80° C. for 90 days or more, e.g., when assessed by capillary gel electrophoresis-sodium dodecyl sulfate (e.g., as described in Example 9).
[1192] 578. The pharmaceutical formulation of any one of embodiments 528-577, wherein the ratio of VP3 protein to VP2 protein (e.g., VP3:VP2), VP3 protein to VP1 protein (VP3:VP1), or VP3 protein to VP2 and VP1 proteins (VP3:VP2:VP1) of the AAV capsids of the AAV particle does not differ from a reference ratio (e.g., baseline ratio, such as the ratio at time 0) by more than about 25% (e.g., about 20%, about 15%, about 10%, about 5%, about 1%, 1-25%, 1-20%, 1-15%, 1-10%, 1-5%, 5-25%, 5-20%, 5-15%, 5-10%, 10-25%, 10-20%, 10-15%, 15-25%, 15-20%, or 20-25%) when the pharmaceutical formulation is stored at −80° C. for 90 days or more, e.g., when assessed by capillary gel electrophoresis-sodium dodecyl sulfate (e.g., as described in Example 9).
[1193] 579. The pharmaceutical formulation of any one of embodiments 528-578, wherein the purity of AAV capsids of the AAV particle is at least 95% (e.g., at least 96%, at least 97%, at least 98%, at least 99%, or 100%) when the pharmaceutical formulation is stored at −80° C. for 90 days or more, e.g., when assessed by capillary gel electrophoresis-sodium dodecyl sulfate (e.g., as described in Example 9).
[1194] 580. The pharmaceutical formulation of any one of embodiments 528-579, wherein the purity of AAV capsids of the AAV particle does not differ from a reference value (e.g., baseline value, such as the value at time 0) by more than about 5% (e.g., about 4%, about 3%, about 2%, about 1%) when the pharmaceutical formulation is stored at −80° C. for 90 days or more, e.g., when assessed by capillary gel electrophoresis-sodium dodecyl sulfate (e.g., as described in Example 9).
[1195] 581. The pharmaceutical formulation of any one of embodiments 528-580, wherein:
   [1196] (a) the pI value (e.g., central pI value) of the AAV capsids of the AAV particle is in the range of 5.8-6.5 (e.g., 5.8-6.4, 5.8-6.3, 5.8-6.2, 5.8-6.1, 5.9-6.4, 5.9-6.3, 5.9-6.2, 5.9-6.1, 6.0-6.4, 6.0-6.3, 6.0-6.2, 6.0-6.1, 6.1-6.4, 6.1-6.3, 6.1-6.2, 6.2-6.4, 6.2-6.3, 6.2-6.2, or 6.3-6.4) when the pharmaceutical formulation is stored at −80° C. for 90 days or more, e.g., when assessed by cIEF (e.g., as described in Example 9),
   [1197] (b) the pI value (e.g., central pI value) of the AAV capsids of the AAV particle does not differ from a reference value (e.g., baseline pI value (e.g., central pI value), such as the pI at time 0) by more than about 10% (e.g., about 9%, about 8%, about 7%, about 6%, about 5%, about 4%, about 3%, about 2%, about 1%, 1-10%, 1-8%, 1-6%, 1-5%, 1-4%, 1-3%, or 1-2%) when the pharmaceutical formulation is stored at −80° C. for 90 days or more, e.g., when assessed by cIEF (e.g., as described in Example 9),
   [1198] (c) the pI value (e.g., central pI value) of the AAV capsids of the AAV particle is in the range of 5.9-6.2 (e.g., 5.9-6.0, 5.9-6.1, 6.0-6.1, 6.0-6.2, 6.1-6.2, 5.9, 6.0, 6.1, or 6.2) when the pharmaceutical formulation is stored at 2-8° C. for 90 days or more, e.g., when assessed by cIEF (e.g., as described in Example 9), and/or
[1199] (d) the pI value (e.g., central pI value) of the AAV capsids of the AAV particle does not differ from a reference value (e.g., baseline pI value (e.g., central pI value), such as the pI at time 0) by more than about 10% (e.g., about 9%, about 8%, about 7%, about 6%, about 5%, about 4%, about 3%, about 2%, about 1%, 1-10%, 1-8%, 1-6%, 1-5%, 1-4%, 1-3%, or 1-2%) when the pharmaceutical formulation is stored at 2-8° C. for 90 days or more, e.g., when assessed by cIEF (e.g., as described in Example 9).
[1200] 582. The pharmaceutical formulation of any one of embodiments 528-581, wherein the AAV viral titer is at least 5×1012 vg/ml (e.g., at least 6×1012 vg/ml, at least 7×1012 vg/ml, at least 8×1012 vg/ml, at least 9×1012 vg/ml, at least 1×1013 vg/ml, at least 2×1013 vg/ml, at least 3×1013 vg/ml, at least 4×1013 vg/ml, at least 5×1013 vg/ml, at least 6×1013 vg/ml, at least 7×1013 vg/ml, at least 8×1013 vg/ml, at least 9×1013 vg/ml, at least 1×1014 vg/ml, 5×1012 vg/ml to 1×1014 vg/ml, 5×1012 vg/ml to 5×1013 vg/ml, 1×1013 vg/ml to 1×1014 vg/ml, 1×1013 vg/ml to 5×1013 vg/ml, or 5×1012 vg/ml to 5×1013 vg/ml) when the pharmaceutical formulation is (a) stored at 2-8° C. for at least 14 days (e.g., 14 days, 30 days, 60 days, or 90 days), (b) stored at −80° C. for at least 14 days (e.g., 14 days, 30 days, 60 days, or 90 days), (c) stored at 2-8° C. for at least 14 days (e.g., 14 days, 30 days, 60 days, or 90 days), or (d) subjected to 1-6 freeze thaw cycles (e.g., 1-5, 1-4, 1-3, 1-2, 2-6, 2-5, 2-4, 2-3, 3-6, 3-5, 3-4, 4-6, or 4-5 freeze thaw cycles), e.g., when assessed by qPCR as described in Example 9.
[1201] 583. The pharmaceutical formulation of any one of embodiments 528-582, wherein:
   [1202] (a) the % high molecular weight (% HMW) aggregates in the pharmaceutical formulation is about 10% or less (e.g., 9%, 8%, 7%, 6%, 5%, 4%, 3%, 2%, 1%, 1-10%, 1-9%, 1-8%, 1-7%, 1-6%, 1-5%, or 1-4%) when the pharmaceutical formulation is stored at −80° C. for at least 30 days (e.g., 30 days, 60 days, or 90 days), e.g., when assessed by size exclusion chromatography (e.g., as described in Example 9),
   [1203] (b) the % HMW aggregates in the pharmaceutical formulation does not differ from a reference value (e.g., baseline % HMW, such as % HMW at time 0) by more than about 30% (e.g., about 25%, about 20%, about 15%, about 10%, or about 5%) when the pharmaceutical formulation is stored at −80° C. for at least 30 days (e.g., 30 days, 60 days, or 90 days), e.g., when assessed by size exclusion chromatography (e.g., as described in Example 9),
   [1204] (c) the % HMW aggregates in the pharmaceutical formulation is about 5% or less (e.g., 4%, 3%, 2%, 1%, 1-5%, 1-4%, or 1-3%) when the pharmaceutical formulation is stored at room temperature for at least 30 days (e.g., 30 days, 60 days, or 90 days), e.g., when assessed by size exclusion chromatography (e.g., as described in Example 9),
   [1205] (d) the % HMW aggregates in the pharmaceutical formulation does not differ from a reference value (e.g., baseline % HMW, such as % HMW at time 0) by more than about 30% (e.g., about 25%, about 20%, about 15%, about 10%, or about 5%) when the pharmaceutical formulation is stored at room temperature for at least 30 days (e.g., 30 days, 60 days, or 90 days), e.g., when assessed by size exclusion chromatography (e.g., as described in Example 9),
   [1206] (e) the % HMW aggregates in the pharmaceutical formulation is about 5% or less (e.g., 4%, 3%, 2%, 1%, 1-5%, 1-4%, or 1-3%) when the pharmaceutical formulation is stored at 2-8° C. for at least 90 days (e.g., 90 days), e.g., when assessed by size exclusion chromatography (e.g., as described in Example 9),
   [1207] (f) the % HMW aggregates in the pharmaceutical formulation does not differ from a reference value (e.g., baseline % HMW, such as % HMW at time 0) by more than about 30% (e.g., about 25%, about 20%, about 15%, about 10%, or about 5%) when the pharmaceutical formulation is stored at 2-8° C. for at least 90 days (e.g., 90 days), e.g., when assessed by size exclusion chromatography (e.g., as described in Example 9),
   [1208] (g) the % HMW aggregates in the pharmaceutical formulation is about 5% or less (e.g., 4%, 3%, 2%, 1%, 1-5%, 1-4%, or 1-3%) when subjected to one or more (e.g., 1, 2, 3, 4, 5, 6, or more) freeze thaw cycles (e.g., −80° C. to 25° C. freeze thaw), e.g., when assessed by size exclusion chromatography (e.g., as described in Example 9), and/or
   [1209] (h) the % HMW aggregates in the pharmaceutical formulation does not differ from a reference value (e.g., baseline % HMW, such as % HMW at time 0) by more than about 20% (e.g., about 15%, about 10%, or about 5%) when subjected to one or more (e.g., 1, 2, 3, 4, 5, 6, or more) freeze thaw cycles (e.g., −80° C. to 25° C. freeze thaw), e.g., when assessed by size exclusion chromatography (e.g., as described in Example 9).
[1210] 584. The pharmaceutical formulation of any one of embodiments 528-583, wherein:
   [1211] (a) the % full capsids of the AAV particle is at least 45% (e.g., at least 50%, at least 60%, at least 70%, 45-70%, 50-70%, 45-60%, or 45-55%) when the pharmaceutical formulation is stored at −80° C. for at least 7 days (e.g., 7 days, 14 days, or 30 days), e.g., when assessed as described in Example 9,
   [1212] (b) the % full capsids of the AAV particle does not differ from a reference value (e.g., baseline % full capsids at time 0) by more than about 10% (e.g., about 5%, about 3%, about 1%, 1-10%, 1-5%, 1-3%, or 5-10%) when the pharmaceutical formulation is stored at −80° C. for at least 7 days (e.g., 7 days, 14 days, or 30 days), e.g., when assessed as described in Example 9,
   [1213] (c) the % full capsids of the AAV particle is at least 35% (e.g., at least 40%, at least 45%, at least 50%, at least 60%, at least 70%, 35-70%, 35-60%, 35-50%, 35-45%, 40-70%, 40-60% 40-50%, 40-45%, 45-70%, 45-60%, 45-50%, 50-70%, or 50-60%) when the pharmaceutical formulation is stored at 2-8° C. for at least 7 days (e.g., 7 days, 14 days, or 30 days), e.g., when assessed as described in Example 9,
   [1214] (d) the % full capsids of the AAV particle does not differ from a reference value (e.g., baseline % full capsids at time 0) by more than about 25% (e.g., about 20%, about 15%, about 10%, or about 5%) when the pharmaceutical formulation is stored at 2-8° C. for at least 7 days (e.g., 7 days, 14 days, or 30 days), e.g., when assessed as described in Example 9,
   [1215] (e) the % full capsids of the AAV particle is at least 30% (e.g., at at least 35%, least 40%, at least 45%, at least 50%, at least 60%, at least 70%, 30-70%, 30-60%, 30-50%, 30-40%, 35-70%, 35-60%, 35-50%, 35-40%, 40-70%, 40-60% 40-50%, 45-70%, 45-60%, 45-50%, 50-70%, or 50-60%) when the pharmaceutical formulation is stored at room temperature for at least 7 days (e.g., 7 days, 14 days, or 30 days), e.g., when assessed as described in Example 9, and/or
   [1216] (f) the % full capsids of the AAV particle does not differ from a reference value (e.g., baseline % full capsids at time 0) by more than about 40% (e.g., about 35%, about 30%, about 25%, about 20%, about 15%, about 10%, or about 5%) when the pharmaceutical formulation is stored at room temperature for at least 7 days (e.g., 7 days, 14 days, or 30 days), e.g., when assessed as described in Example 9.
[1217] 585. The pharmaceutical formulation of any one of embodiments 528-584, wherein the AAV particle of any one of embodiments 429-472 of the enumerated embodiments, an AAV particle comprising the capsid variant of any one of embodiments 1-420 or 428 of the enumerated embodiments, an AAV particle comprising the peptide of any one of embodiments 423-425 or 428 of the enumerated embodiments; or the AAV particle of any one of embodiments 124-152 of the additional enumerated embodiments, an AAV particle comprising the capsid variant of any one of embodiments 1-102 or 108 of the additional enumerated embodiments, or an AAV particle comprising the peptide of embodiment 107 of the additional enumerated embodiments.
[1218] 586. The pharmaceutical formulation of any one of embodiments 528-585, wherein the AAV particle, or variant thereof, comprises an AAV capsid variant comprising:
   [1219] (i) the amino acid sequence of any one of SEQ ID NOs: 5, 8, 3636-3647, or a sequence with at least 80% (e.g., at least about 85, 90, 95, 96, 97, 98, or 99%) sequence identity thereto;
   [1220] (ii) an amino acid sequence comprising at least one, two or three modifications, but not more than 30, 20 or 10 modifications relative to the amino acid sequence of any one of SEQ ID NOs: 5, 8, 3636-3647;
   [1221] (iii) an amino acid sequence comprising at least one, two or three, but not more than 30, 20 or 10 different amino acids relative to the amino acid sequence of any one of SEQ ID NOs: 5, 8, 3636-3647.
[1222] 587. The pharmaceutical formulation of any one of embodiments 528-586, wherein the AAV particle, or variant thereof, comprises an AAV capsid variant comprising:
   [1223] (i) the amino acid sequence of SEQ ID NO: 5, 8, 3636, or a sequence with at least 80% (e.g., at least about 85, 90, 95, 96, 97, 98, or 99%) sequence identity thereto;
   [1224] (ii) an amino acid sequence comprising at least one, two or three modifications, but not more than 30, 20 or 10 modifications relative to the amino acid sequence of SEQ ID NO: 5, 8, 3636;
   [1225] (iii) an amino acid sequence comprising at least one, two or three, but not more than 30, 20 or 10 different amino acids relative to the amino acid sequence of SEQ ID NOs: 5, 8, 3636.
[1226] 588. The pharmaceutical formulation of any one of embodiments 528-587, which is administered intravenously to a subject (e.g., a human), e.g., in a high volume (e.g., a volume comprising more than 100 mL) or a low volume (e.g., a volume comprising 100 mL or a volume comprising no more than 100 mL).
[1227] 589. The pharmaceutical formulation of any one of embodiments 528-588, wherein the AAV particle is present at a dose of about 6.7e11 VG/kg to 2e13 VG/kg (e.g., 6.7e11 VG/kg, 2e12 VG/kg, 6.7e12 VG/kg, or 2e13 VG/kg) or about 5e11 VG/kg to 3e13 VG/kg.
[1228] 590. The pharmaceutical formulation of any one of embodiments 528-589, wherein the AAV particle is present at a dose of about 6.7e10 VG/kg to 6.7e12 VG/kg, about 1.3e11 VG/kg to 3.4e12 VG/kg, or about 2.2e11 VG/kg to 2e12 VG/kg.
[1229] 591. The pharmaceutical formulation of any one of embodiments 528-590, wherein the AAV particle is present at a dose of about 4e11 VG/kg to 8e11 VG/kg (e.g., about 6.7e11 VG/kg).
[1230] 592. The pharmaceutical formulation of any one of embodiments 528-591, wherein the AAV particle is present at a dose of about 6.7e11 VG/kg.
[1231] 593. The pharmaceutical formulation of any one of embodiments 528-592, wherein the AAV particle is present at a dose of about 2e11 VG/kg to 2e13 VG/kg, about 4e11 VG/kg to 1e13 VG/kg, about 6.7e11 VG/kg to about 6e12 VG/kg.
[1232] 594. The pharmaceutical formulation of any one of embodiments 528-593, wherein the AAV particle is present at a dose of about 1e12 VG/kg to 5e12 VG/kg (e.g., about 2e12 VG/kg).
[1233] 595. The pharmaceutical formulation of any one of embodiments 528-594, wherein the AAV particle is present at a dose of about 2e12 VG/kg.
[1234] 596. The pharmaceutical formulation of any one of embodiments 528-595, wherein the AAV particle is present at a dose of about 6.7e11 VG/kg to 6.7e13 VG/kg, about 1.3e12 VG/kg to 3.4e13 VG/kg, or about 2.2e12 VG/kg to 2e13 VG/kg.
[1235] 597. The pharmaceutical formulation of any one of embodiments 528-596, wherein the AAV particle is present at a dose of about 4e12 VG/kg to 8e12 VG/kg (e.g., about 6.7e12 VG/kg).
[1236] 598. The pharmaceutical formulation of any one of embodiments 528-597, wherein the AAV particle is present at a dose of about 6.7e12 VG/kg.
[1237] 599. The pharmaceutical formulation of any one of embodiments 528-598, wherein the AAV particle is present at a dose of about 2e12 VG/kg to 2e14 VG/kg, about 4e12 VG/kg to 1e14 VG/kg, about 6.7e12 VG/kg to about 6e13 VG/kg.
[1238] 600. The pharmaceutical formulation of any one of embodiments 528-599, wherein the AAV particle is administered at a dose of about 1e13 VG/kg to 5e13 VG/kg (e.g., about 2e13 VG/kg).
[1239] 601. The pharmaceutical formulation of any one of embodiments 528-600, wherein the AAV particle is administered at a dose of about 2e13 VG/kg.
[1240] 602. The pharmaceutical formulation of any one of embodiments 581-601, wherein the AAV particle comprises a viral genome which is single stranded.
[1241] 603. The pharmaceutical formulation of any one of embodiments 528-602, which is formulated for intravenous administration.
[1242] 604. A method of treating a subject having or diagnosed with having a genetic disorder (e.g., a monogenic disorder or a polygenic disorder), a neurological disorder (e.g., a neurodegenerative disorder), a muscular disorder, a neuromuscular disorder, or a neuro-oncological disorder, comprising administering to the subject an effective amount of the pharmaceutical formulation of any one of embodiments 528-603, optionally wherein the pharmaceutical formulation is administered to the subject intravenously, e.g., in a high volume (e.g., a volume comprising more than 100 mL) or a low volume (e.g., a volume comprising 100 mL or a volume comprising no more than 100 mL).
[1243] 605. The pharmaceutical formulation of any one of embodiments 528-603, for use in a method of treating a genetic disorder (e.g., a monogenic disorder or a polygenic disorder), a neurological disorder (e.g., a neurodegenerative disorder), a muscular disorder, a neuromuscular disorder, or a neuro-oncological disorder, optionally wherein the pharmaceutical formulation is suitable for intravenous administration, e.g., in a high volume (e.g., a volume comprising more than 100 mL) or a low volume (e.g., a volume comprising 100 mL or a volume comprising no more than 100 mL).
[1244] 606. Use of pharmaceutical formulation of any one of embodiments 528-603, in the manufacture of a medicament, optionally wherein the pharmaceutical formulation is suitable for intravenous administration, e.g., in a high volume (e.g., a volume comprising more than 100 mL) or a low volume (e.g., a volume comprising 100 mL or a volume comprising no more than 100 mL).
[1245] 607. Use of pharmaceutical formulation of any one of embodiments 528-603, in the manufacture of a medicament for treating a genetic disorder (e.g., a monogenic disorder or a polygenic disorder), a neurological disorder (e.g., a neurodegenerative disorder), a muscular disorder, a neuromuscular disorder, or a neuro-oncological disorder, optionally wherein the pharmaceutical formulation is suitable for intravenous administration, e.g., in a high volume (e.g., a volume comprising more than 100 mL) or a low volume (e.g., a volume comprising 100 mL or a volume comprising no more than 100 mL).
[1246] 608. The method of embodiment 604, the pharmaceutical composition for use of embodiment 605, or the use of embodiment 606 or 607, which is formulated for intravenous administration.
[1247] 609. A peptide comprising an amino acid sequence comprising the formula [N1]-[N2] according to any one of embodiments 1-13, 17-28, 34-41, 46-68, or 115-118.
[1248] 610. A peptide comprising an amino acid sequence comprising the formula [A][B] according to any one of embodiments 119-127, 131-141, 147-153, 159-177, or 223-226.
[1249] 611. A peptide comprising an amino acid sequence comprising the formula X1-X2-X3-X4-X5-X6-X7-X8-X9-X10-X11-X12-X13-X14-X15-X16-X17-X18-X19, according to any one of embodiments 252-254.
[1250] 612. A peptide comprising an amino acid sequence comprising the formula [N1]-[N2], according to any one of embodiments 259-272, 278, 284, or 286.
[1251] 613. A peptide comprising an amino sequence comprising the formula [B]-[C], according to any one of embodiments 291-302, 308, 314, or 316.
[1252] 614. A peptide comprising an amino acid sequence comprising positions X1-X2-X3-X4-X5-X6-X7-X8-X9, according to embodiment 321.
[1253] 615. The peptide of any one of embodiments 423-425 or 609-614, which is fused or coupled, e.g., conjugated, to an active agent, e.g., a therapeutic agent or a diagnostic agent.
[1254] 616. The peptide of any one of embodiments 423-425 or 609-614, wherein at least 1-5, e.g., at least 1, 2, 3, 4, or 5, peptides are fused or coupled, e.g., conjugated, to an active agent, e.g., a therapeutic agent or a diagnostic agent.
[1255] 617. The peptide of embodiment 616, wherein the at least 1-5, e.g., at least 1, 2, 3, 4, or 5, peptides comprise the same amino acid sequence.
[1256] 618. The peptide of embodiment 616, wherein the at least 1-5, e.g., at least 1, 2, 3, 4, or 5, peptides comprise different amino acid sequences.
[1257] 619. The peptide of any one of embodiments 615-618, wherein the at least 1-5, e.g., at least 1, 2, 3, 4, or 5, peptides are present in tandem (e.g., connected directly or indirectly via a linker) or in a multimeric configuration.
[1258] 620. The peptide of any one of embodiments 423-425 or 609-619, wherein the peptide comprises an amino acid sequence of at least 3, 4, 5, 6, 7, 8, 9, 10, 11, 12, 15, 20, 25, 30, or 35 amino acids in length.
[1259] 621. The peptide of any one of embodiments 615-620, wherein the active agent is or comprises a therapeutic agent chosen from a protein (e.g., an enzyme), an antibody molecule, a nucleic acid molecule (e.g., an RNAi agent), or a small molecule.
[1260] 622. The peptide of any one of embodiments 615-620, wherein the active agent is or comprises a ribonucleic acid complex (e.g., a Cas9/gRNA complex), a plasmid, a closed-end DNA, a circ-RNA, or an mRNA.
[1261] 623. The peptide of any one of embodiments 615-620, wherein the active agent is an RNAi agent.
[1262] 624. The peptide of embodiment 623, wherein the RNAi agent is a dsRNA, a siRNA, a shRNA, a pre-miRNA, a pri-miRNA, a miRNA, a stRNA, a lncRNA, a piRNA, an antisense oligonucleotide agent (ASO), or a snoRNA, optionally wherein the RNAi agent is an siRNA or an ASO, which further optionally comprises at least one modified nucleotide.
[1263] 625. The peptide of any one of embodiments 615-624, wherein the active agent modulates, e.g., inhibits, decreases or increases, expression of, a CNS related gene, mRNA, and/or protein.
[1264] 626. The peptide of any one of embodiments 615-620, wherein the active agent is a diagnostic agent is or comprises an imaging agent (e.g., a protein or small molecule compound coupled to a detectable moiety).
[1265] 627. The peptide of any one of embodiments 615-626, wherein the peptide covalently linked, e.g., directly or indirectly via a linker, to the active agent.
[1266] 628. The peptide of any one of embodiments 615-627, wherein the peptide is conjugated to the active agent via a linker.
[1267] 629. The peptide of embodiment 628, wherein the linker is a cleavable linker or a non-cleavable linker.
[1268] 630. The peptide of embodiment 628, wherein the cleavable linker is a pH sensitive linker or an enzyme sensitive linker.
[1269] 631. The peptide of embodiment 629 or 630, wherein:
   [1270] (i) the pH sensitive linker comprises a hydrazine/hydrazone linker or a disulfide linker;
   [1271] (ii) the enzyme sensitive linker comprises a peptide based linker, e.g., a peptide linker sensitive to a protease (e.g., a lysosomal protease); or a beta-glucuronide linker; or
   [1272] (iii) the non-cleavable linker is a linker comprising a thioether group or a maleimidocaproyl group.
[1273] 632. The peptide of any one of embodiments 615-631, wherein:
   [1274] (i) the peptide and the active agent are fused or coupled post-translationally, e.g., using click chemistry; or
   [1275] (ii) the peptide and the active agent are fused or couple via chemically induced dimerization.
[1276] 633. The peptide of any one of embodiments 615-632, wherein the peptide is present N-terminal relative to the active agent.
[1277] 634. The peptide of any one of embodiments 615-632, wherein the peptide is present C-terminal relative to the active agent.
[1278] 635. The peptide of any one of embodiment 615-620, 625, or 627-634, wherein the peptide is present or coupled to a carrier, e.g., an exosome, a microvesicle, or a lipid nanoparticle (LNP), optionally, wherein the carrier comprises a therapeutic agent (e.g., an RNAi agent (e.g., an dsRNA, a siRNA, a shRNA, a pre-miRNA, a pri-miRNA, a miRNA, a stRNA, a lncRNA, a piRNA, an antisense oligonucleotide agent (ASO), or a snoRNA), an mRNA, a ribonucleoprotein complex (e.g., a Cas9/gRNA complex), or a circRNA).
[1279] 636. The peptide of embodiment 635, wherein the peptide is present on the surface of the carrier, optionally wherein at least 10%, 20%, 30%, 40%, 50%, 60%, 70%, or 80% of the surface of the carrier comprises at least 1-5, e.g., at least 1, 2, 3, 4, or 5 peptides according to any one of embodiments 422-436 or 609-614.
[1280] 637. The AAV capsid variant of any one of embodiments 1-420, wherein the AAV capsid variant comprises an amino acid sequence comprising at least 5, 6, 7, 8, or 9 consecutive amino acids from the amino acid sequence of PLNGAVHLY (SEQ ID NO: 3648), wherein:
   [1281] (i) the 5 consecutive amino acids comprise PLNGA (SEQ ID NO: 3679);
   [1282] (ii) the 6 consecutive amino acids comprise PLNGAV (SEQ ID NO: 3680);
   [1283] (iii) the 7 consecutive amino acids comprise PLNGAVH (SEQ ID NO: 3681);
   [1284] (iv) the 8 consecutive amino acids comprise PLNGAVHL (SEQ ID NO: 3682); or
   [1285] (v) the 9 consecutive amino acids comprise PLNGAVHLY (SEQ ID NO: 3648),
   [1286] wherein the AAV capsid variant comprises: (a) a VP1 protein comprising the amino acid sequence of SEQ ID NO: 138 or SEQ ID NO: 5, 8, or 3636; (b) a VP2 protein comprising the amino acid sequence of positions 138-736 of SEQ ID NO: 138 or positions 138-743 of SEQ ID NO: 5, 8, or 3636; (c) a VP3 protein comprising the amino acid sequence of positions 203-736 of SEQ ID NO: 138 or positions 203-743 of SEQ ID NO: 5, 8, or 3636; or (d) an amino acid sequence with at least 90% (e.g., at least about 95, 96, 97, 98, or 99%) sequence identity to any of the amino acid sequences in (a)-(c).
[1287] 638. The AAV capsid variant of any one of embodiments 1-420 or 637, wherein the AAV capsid variant comprises an amino acid sequence comprising at least 5, 6, 7, 8, or 9 consecutive amino acids from the amino acid sequence of PLNGAVHLY (SEQ ID NO: 3648), wherein:
   [1288] (i) the 5 consecutive amino acids comprise PLNGA (SEQ ID NO: 3679);
   [1289] (ii) the 6 consecutive amino acids comprise PLNGAV (SEQ ID NO: 3680);
   [1290] (iii) the 7 consecutive amino acids comprise PLNGAVH (SEQ ID NO: 3681);
   [1291] (iv) the 8 consecutive amino acids comprise PLNGAVHL (SEQ ID NO: 3682); or
   [1292] (v) the 9 consecutive amino acids comprise PLNGAVHLY (SEQ ID NO: 3648),
   [1293] wherein the AAV capsid variant comprises the amino acid sequence of any one of SEQ ID NOs: 5, 8, or 3636 or an amino acid sequence with at least 90% (e.g., at least about 95, 96, 97, 98, or 99%) sequence identity to any one of SEQ ID NOs: 5, 8, or 3636.
[1294] 639. The AAV capsid variant of any one of embodiments 1-420, 637, or 638, wherein the AAV capsid variant comprises one or two, but no more than three different amino acids (e.g., substitutions, e.g., conservative substitutions) relative to the amino acid sequence of PLNGAVHLY (SEQ ID NO: 3648), wherein the AAV capsid variant comprises:
   [1295] (a) a VP1 protein comprising the amino acid sequence of SEQ ID NO: 5, 8, 138, or 3636;
   [1296] (b) a VP2 protein comprising the amino acid sequence of positions 138-736 of SEQ ID NO: 138 or positions 138-743 of SEQ ID NO: 5, 8, or 3636;
   [1297] (c) a VP3 protein comprising the amino acid sequence of positions 203-736 of SEQ ID NO: 138 or positions 203-743 of SEQ ID NO: 5, 8, or 3636; or
   [1298] (d) an amino acid sequence with at least 90% (e.g., at least about 95, 96, 97, 98, or 99%) sequence identity to any of the amino acid sequences in (a)-(c).
[1299] 640. The AAV capsid variant of any one of embodiments 1-420 or 637-639, wherein the AAV capsid variant comprises one or two, but no more than three different amino acids (e.g., substitutions, e.g., conservative substitutions) relative to the amino acid sequence of PLNGAVHLY (SEQ ID NO: 3648), wherein the AAV capsid variant comprises the amino acid sequence of any one of SEQ ID NOs: 5, 8, 138, or 3636 or an amino acid sequence with at least 90% (e.g., at least about 95, 96, 97, 98, or 99%) sequence identity to any one of SEQ ID NOs: 5, 8, 138, or 3636.
[1300] 641. The AAV capsid variant of any one of embodiments 637-640, wherein the amino acid sequence is present immediately subsequent to position 586, numbered according to any one of SEQ ID NO: 5, 8, 138, or 3636, optionally wherein the amino acid replaces positions 587 and 588 (e.g., A587 and Q588), numbered according to SEQ ID NO: 138.
[1301] 642. The AAV capsid variant of any one of embodiments 637-641, wherein the amino acid sequence corresponds to positions 587-595 of SEQ ID NO: 5, 8, or 3636.
[1302] 643. The AAV capsid variant of any one of embodiments 1-420, wherein the AAV capsid variant comprises one or two, but no more than three different amino acids (e.g., substitutions, e.g. conservative substitutions) relative to the amino acid sequence of PLNGAVHLYAQAQLSPVKN (SEQ ID NO: 566), wherein the AAV capsid variant comprises:
   [1303] (a) a VP1 protein comprising the amino acid sequence of SEQ ID NO: 5, 8, 138, or 3636;
   [1304] (b) a VP2 protein comprising the amino acid sequence of positions 138-736 of SEQ ID NO: 138 or positions 138-743 of SEQ ID NO: 5, 8, or 3636;
   [1305] (c) a VP3 protein comprising the amino acid sequence of positions 203-736 of SEQ ID NO: 138 or positions 203-743 of SEQ ID NO: 5, 8, or 3636; or
   [1306] (d) an amino acid sequence with at least 90% (e.g., at least about 95, 96, 97, 98, or 99%) sequence identity to any of the amino acid sequences in (a)-(c).
[1307] 644. The AAV capsid variant of any one of embodiments 1-420 or 643, wherein the AAV capsid variant comprises one or two, but no more than three different amino acids (e.g., substitutions, e.g., conservative substitutions) relative to the amino acid sequence of PLNGAVHLYAQAQLSPVKN (SEQ ID NO: 566), wherein the AAV capsid variant comprises the amino acid sequence of any one of SEQ ID NOs: 5, 8, 138, or 3636 or an amino acid sequence with at least 90% (e.g., at least about 95, 96, 97, 98, or 99%) sequence identity to any one of SEQ ID NOs: 5, 8, 138, or 3636.
[1308] 645. The AAV capsid variant of any one of embodiments 1-420, wherein the AAV capsid variant comprises one or two, but no more than three different amino acids (e.g., substitutions, e.g., conservative substitutions) relative to the amino acid sequence of PLNGAVHLYAQAQTGWVPN (SEQ ID NO: 314), wherein the AAV capsid variant comprises:
   [1309] (a) a VP1 protein comprising the amino acid sequence of SEQ ID NO: 5, 8, 138, or 3636;
   [1310] (b) a VP2 protein comprising the amino acid sequence of positions 138-736 of SEQ ID NO: 138 or positions 138-743 of SEQ ID NO: 5, 8, or 3636;
   [1311] (c) a VP3 protein comprising the amino acid sequence of positions 203-736 of SEQ ID NO: 138 or positions 203-743 of SEQ ID NO: 5, 8, or 3636; or
   [1312] (d) an amino acid sequence with at least 90% (e.g., at least about 95, 96, 97, 98, or 99%) sequence identity to any of the amino acid sequences in (a)-(c).
[1313] 646. The AAV capsid variant of any one of embodiments 1-420 or 645, wherein the AAV capsid variant comprises one or two, but no more than three different amino acids (e.g., substitutions, e.g., conservative substitutions) relative to the amino acid sequence of PLNGAVHLYAQAQTGWVPN (SEQ ID NO: 314), wherein the AAV capsid variant comprises the amino acid sequence of any one of SEQ ID NOs: 5, 8, 138, or 3636 or an amino acid sequence with at least 90% (e.g., at least about 95, 96, 97, 98, or 99%) sequence identity to any one of SEQ ID NOs: 5, 8, 138, or 3636.
[1314] 647. The AAV capsid variant of any one of embodiments 643-646, wherein the amino acid sequence is present immediately subsequent to position 586, numbered according to any one of SEQ ID NO: 5, 8, 138, or 3636, optionally wherein the amino acid replaces positions 587-598, numbered according to SEQ ID NO: 138.
[1315] 648. The AAV capsid variant of any one of embodiments 643-647, wherein the amino acid sequence corresponds to positions 587-605 of SEQ ID NO: 5 or 8.
[1316] 649. The AAV capsid variant of any one of embodiments 643, 644, 647, or 648, which comprises the amino acid sequence of SEQ ID NO: 8.
[1317] 650. The AAV capsid variant of any one of embodiments 645-648, which comprises the amino acid sequence of SEQ ID NO: 5.
[1318] 651. An AAV particle comprising the AAV capsid variant of any one of embodiments 637-650, optionally wherein the AAV particle is according to any one of embodiments 429-472.
[1319] 652. A method of treating a subject having or diagnosed with having a genetic disorder (e.g., a monogenic disorder), a polygenic disorder, a neurological disorder (e.g., a neurodegenerative disorder), a muscular disorder, a neuromuscular disorder, or a neuro-oncological disorder, comprising administering to the subject an effective amount of an AAV particle comprising the AAV capsid variant of any one of embodiments 637-650 or the AAV particle of embodiment 651.
[1320] 653. A method of delivering a payload to a cell or tissue (e.g., a CNS cell or a CNS tissue), comprising administering an effective amount of the an AAV particle comprising the AAV capsid variant of any one of embodiments 637-650 or the AAV particle of embodiment 651, optionally wherein the cell or tissue is within a subject and further optionally wherein the subject has, has been diagnosed with having, or is at risk of having a genetic disorder (e.g., a monogenic disorder), a polygenic disorder, a neurological disorder (e.g., a neurodegenerative disorder), a muscular disorder, a neuromuscular disorder, or a neuro-oncological disorder.

### ADDITIONAL ENUMERATED EMBODIMENTS

[1321] 1. An AAV capsid polypeptide, e.g., an AAV capsid variant, comprising:
[1322] (a) the amino acid sequence of any of SEQ ID NO: 1725-3622 or 3648-3659;
[1323] (b) at least 3, 4, 5, 6, 7, 8, or 9 consecutive amino acids from the amino acid sequence of any of SEQ ID NO: 1725-3622 or 3648-3659; or
[1324] (c) an amino acid sequence comprising no more than four modifications, e.g., substitutions, relative to the amino acid sequence of any of SEQ ID NO: 1725-3622 or 3648-3659, and
[1325] optionally wherein the AAV capsid variant further comprises one, two, or all of an amino acid other than T at position 593 (e.g., a V, S, L, R, I, A, N, C, Q, M, P, or K), an amino acid other than G at position 594 (e.g., T, M, A, K, S, Q, V, I, R, N, P, L, H, or Y), and/or an amino acid other than W at position 595 (e.g., K, Q, S, P, C, A, G, N, T, R, V, M, H, L, E, F, or Y), relative to a reference sequence numbered according to the amino acid sequence of SEQ ID NO: 138.
[1326] 2. An AAV capsid polypeptide, e.g., an AAV capsid variant, comprising:
[1327] (a) the amino acid sequence of any of SEQ ID NO: 3648-3659;
[1328] (b) at least 3, 4, 5, 6, 7, 8, or 9 consecutive amino acids from the amino acid sequence of any of SEQ ID NO: 3648-3659; or
[1329] (c) an amino acid sequence comprising no more than four modifications, e.g., substitutions, relative to the amino acid sequence of any of SEQ ID NO: 3648-3659, and
[1330] optionally wherein the AAV capsid variant further comprises one, two, or all of an amino acid other than T at position 593 (e.g., a V, S, L, R, I, A, N, C, Q, M, P, or K), an amino acid other than G at position 594 (e.g., T, M, A, K, S, Q, V, I, R, N, P, L, H, or Y), and/or an amino acid other than W at position 595 (e.g., K, Q, S, P, C, A, G, N, T, R, V, M, H, L, E, F, or Y), relative to a reference sequence numbered according to the amino acid sequence of SEQ ID NO: 138.
[1331] 3. The AAV capsid polypeptide, e.g., the AAV capsid variant, of embodiment 1 or 2, which comprises at least 3, 4, 5, 6, 7, 8, or 9 consecutive amino acids from the amino acid sequence of any of SEQ ID NO: 3648-3659.
[1332] 4. The AAV capsid polypeptide, e.g., the AAV capsid variant, of any one of embodiments 1-3, wherein the 3 consecutive amino acids comprise PLN.
[1333] 5. The AAV capsid polypeptide, e.g., the AAV capsid variant, of any one of embodiments 1-4, wherein the 4 consecutive amino acids comprise PLNG (SEQ ID NO: 3678).
[1334] 6. The AAV capsid polypeptide, e.g., the AAV capsid variant, of any one of the preceding embodiments, wherein the 5 consecutive amino acids comprise PLNGA (SEQ ID NO: 3679).
[1335] 7. The AAV capsid polypeptide, e.g., the AAV capsid variant, of any one of the preceding embodiments, wherein the 6 consecutive amino acids comprise PLNGAV (SEQ ID NO: 3680).
[1336] 8. The AAV capsid polypeptide, e.g., the AAV capsid variant, of any one of the preceding embodiments, wherein the 7 consecutive amino acids comprise PLNGAVH (SEQ ID NO: 3681).
[1337] 9. The AAV capsid polypeptide, e.g., the AAV capsid variant, of any one of the preceding embodiments, wherein the 8 consecutive amino acids comprise PLNGAVHL (SEQ ID NO: 3682).
[1338] 10. The AAV capsid polypeptide, e.g., the AAV capsid variant, of any one of the preceding embodiments, wherein the 9 consecutive amino acids comprise PLNGAVHLY (SEQ ID NO: 3648).
[1339] 11. The AAV capsid polypeptide, e.g., the AAV capsid variant, of any one of embodiments 1-3, wherein the 3 consecutive amino acids comprise YST.
[1340] 12. The AAV capsid polypeptide, e.g., the AAV capsid variant, of any one of embodiments 1-3 or 11, wherein the 4 consecutive amino acids comprise YSTD (SEQ ID NO: 3690).
[1341] 13. The AAV capsid polypeptide, e.g., the AAV capsid variant, of any one of embodiments 1-3 or 11-12, wherein the 5 consecutive amino acids comprise YSTDE (SEQ ID NO: 3691) or YSTDV (SEQ ID NO: 3700).
[1342] 14. The AAV capsid polypeptide, e.g., the AAV capsid variant, of any one of embodiments 1-3 or 11-13, wherein the 6 consecutive amino acids comprise YSTDER (SEQ ID NO: 3692) or YSTDVR (SEQ ID NO: 3701).
[1343] 15. The AAV capsid polypeptide, e.g., the AAV capsid variant, of any one of embodiments 1-3, wherein the 3 consecutive amino acids comprise IVM.
[1344] 16. The AAV capsid polypeptide, e.g., the AAV capsid variant, of any one of embodiments 1-3 or 15, wherein the 4 consecutive amino acids comprise IVMN (SEQ ID NO: 3693).
[1345] 17. The AAV capsid polypeptide, e.g., the AAV capsid variant, of any one of embodiments 1-3 or 15-16, wherein the 5 consecutive amino acids comprise IVMNS (SEQ ID NO: 3694).
[1346] 18. The AAV capsid polypeptide, e.g., the AAV capsid variant, of any one of embodiments 1-3 or 15-17, wherein the 6 consecutive amino acids comprise IVMNSL (SEQ ID NO: 3695).
[1347] 19. The AAV capsid polypeptide, e.g., the AAV capsid variant, of any one of embodiments 1-3 or 15-18, wherein the 7 consecutive amino acids comprise IVMNSLK (SEQ ID NO: 3651).
[1348] 20. The AAV capsid polypeptide, e.g., the AAV capsid variant of any one of embodiments 1-19, which comprises an amino acid sequence comprising at least one, two, or three but no more than four modifications, e.g., substitutions, relative to the amino acid sequence of any of SEQ ID NO: 3648-3659.
[1349] 21. The AAV capsid polypeptide, e.g., the AAV capsid variant, of any one of embodiments 1-10 or 20, comprising the amino acid sequence of PLNGAVHLY (SEQ ID NO: 3648), or an amino acid sequence having at least one, two, or three but no more than four modifications, e.g., substitutions, relative to the amino acid sequence of PLNGAVHLY (SEQ ID NO: 3648), optionally, wherein position 7 is H.
[1350] 22. The AAV capsid polypeptide, e.g., the AAV capsid variant, of any one of embodiments 1-3 or 20, comprising the amino acid sequence of RDSPKGW (SEQ ID NO: 3649), or an amino acid sequence having at least one, two, or three modifications but no more than four modifications, e.g., substitutions, relative to the amino acid sequence of RDSPKGW (SEQ ID NO: 3649).
[1351] 23. The AAV capsid polypeptide, e.g., the AAV capsid variant, of any one of embodiments 1-3 or 15-20, comprising the amino acid sequence of IVMNSLK (SEQ ID NO: 3651), or an amino acid sequence having at least one, two, or three modifications but no more than four modifications, e.g., substitutions, relative to the amino acid sequence of IVMNSLK (SEQ ID NO: 3651).
[1352] 24. The AAV capsid polypeptide, e.g., the AAV capsid variant, of any one of embodiments 1-3, 11-14, or 20, comprising the amino acid sequence of YSTDVRM (SEQ ID NO: 3650), or an amino acid sequence having at least one, two, or three modifications but no more than four modifications, e.g., substitutions, relative to the amino acid sequence of YSTDVRM (SEQ ID NO: 3650).
[1353] 25. The AAV capsid polypeptide, e.g., the AAV capsid variant, of any one of embodiments 1-3 or 20, comprising the amino acid sequence of RESPRGL (SEQ ID NO: 3652), or a sequence having at least one, two, or three modifications but no more than four modifications, e.g., substitutions, relative to the amino acid sequence of RESPRGL (SEQ ID NO: 3652).
[1354] 26. The AAV capsid polypeptide, e.g., the AAV capsid variant, of any one of the preceding embodiments, which comprises the amino acid sequence of any of SEQ ID NO: 3648-3659.
[1355] 27. The AAV capsid polypeptide, e.g., the AAV capsid variant, of any one of embodiments 1-26, comprising:
[1356] (i) an amino acid sequence encoded by the nucleotide sequence of any one of SEQ ID NOs: 3660-3671, or a nucleotide sequence substantially identical (e.g., having at least 70%, 75%, 80%, 85%, 90%, 92%, 95%, 97%, 98%, or 99% sequence identity) thereto; or
[1357] (ii) an amino acid sequence encoded by a nucleotide sequence comprising at least one, two, three, four, five, six, or seven modifications but no more than ten modifications of the nucleotide sequence of any of SEQ ID NOs: 3660-3671.
[1358] 28. The AAV capsid polypeptide, e.g., the AAV capsid variant, of any one of embodiments 1-27, wherein the nucleotide sequence encoding the AAV capsid variant comprises:
[1359] (i) the nucleotide sequence of any one of SEQ ID NOs: 3660-3671, or a nucleotide sequence substantially identical (e.g., having at least 70%, 75%, 80%, 85%, 90%, 92%, 95%, 97%, 98%, or 99% sequence identity) thereto; or
[1360] (ii) a nucleotide sequence comprising at least one, two, three, four, five, six, or seven modifications but no more than ten modifications of the nucleotide sequence of any of SEQ ID NOs: 3660-3671.
[1361] 29. The AAV capsid polypeptide, e.g., the AAV capsid variant, of any one of embodiments 1-10, 20-21, or 26-28, comprising an amino acid sequence encoded by:
[1362] (i) the nucleotide sequence of SEQ ID NO: 3660, or a nucleotide sequence substantially identical (e.g., having at least 70%, 75%, 80%, 85%, 90%, 92%, 95%, 97%, 98%, or 99% sequence identity) thereto; or
[1363] (ii) a nucleotide sequence comprising at least one, two, three, four, five, six, or seven modifications but no more than ten modifications of the nucleotide sequence of SEQ ID NO: 3660.
[1364] 30. The AAV capsid polypeptide, e.g., the AAV capsid variant, of any one of embodiments 1-10, 20-21, or 26-29, wherein the nucleotide sequence encoding the AAV capsid variant comprises:
[1365] (i) the nucleotide sequence of SEQ ID NO: 3660, or a nucleotide sequence substantially identical (e.g., having at least 70%, 75%, 80%, 85%, 90%, 92%, 95%, 97%, 98%, or 99% sequence identity) thereto; or
[1366] (ii) a nucleotide sequence comprising at least one, two, three, four, five, six, or seven modifications but no more than ten modifications of the nucleotide sequence of SEQ ID NO: 3660.
[1367] 31. The AAV capsid polypeptide, e.g., the AAV capsid variant, of any one of embodiments 1-3, 20, 22, or 26-28, comprising an amino acid sequence encoded by:
[1368] (i) the nucleotide sequence of SEQ ID NO: 3661, or a nucleotide sequence substantially identical (e.g., having at least 70%, 75%, 80%, 85%, 90%, 92%, 95%, 97%, 98%, or 99% sequence identity) thereto; or
[1369] (ii) a nucleotide sequence comprising at least one, two, three, four, five, six, or seven modifications but no more than ten modifications of the nucleotide sequence of SEQ ID NO: 3661.
[1370] 32. The AAV capsid polypeptide, e.g., the AAV capsid variant, of any one of embodiments 1-3, 20, 22, 26-28, or 31, wherein the nucleotide sequence encoding the AAV capsid variant comprises:
[1371] (i) the nucleotide sequence of SEQ ID NO: 3661, or a nucleotide sequence substantially identical (e.g., having at least 70%, 75%, 80%, 85%, 90%, 92%, 95%, 97%, 98%, or 99% sequence identity) thereto; or
[1372] (ii) a nucleotide sequence comprising at least one, two, three, four, five, six, or seven modifications but no more than ten modifications of the nucleotide sequence of SEQ ID NO: 3661.
[1373] 33. The AAV capsid polypeptide, e.g., the AAV capsid variant, of any one of embodiments 1-3, 11-14, 20, 24, or 26-28, comprising an amino acid sequence encoded by:
[1374] (i) the nucleotide sequence of SEQ ID NO: 3662, or a nucleotide sequence substantially identical (e.g., having at least 70%, 75%, 80%, 85%, 90%, 92%, 95%, 97%, 98%, or 99% sequence identity) thereto; or
[1375] (ii) a nucleotide sequence comprising at least one, two, three, four, five, six, or seven modifications but no more than ten modifications of the nucleotide sequence of SEQ ID NO: 3662.
[1376] 34. The AAV capsid polypeptide, e.g., the AAV capsid variant, of any one of embodiments 1-3, 11-14, 20, 24, 26-28, or 33, wherein the nucleotide sequence encoding the AAV capsid variant comprises:
[1377] (i) the nucleotide sequence of SEQ ID NO: 3662, or a nucleotide sequence substantially identical (e.g., having at least 70%, 75%, 80%, 85%, 90%, 92%, 95%, 97%, 98%, or 99% sequence identity) thereto; or
[1378] (ii) a nucleotide sequence comprising at least one, two, three, four, five, six, or seven modifications but no more than ten modifications of the nucleotide sequence of SEQ ID NO: 3662.
[1379] 35. The AAV capsid polypeptide, e.g., the AAV capsid variant, of any one of embodiments 1-3, 15-20, 23, or 26-28, comprising an amino acid sequence encoded by:
[1380] (i) the nucleotide sequence of SEQ ID NO: 3663, or a nucleotide sequence substantially identical (e.g., having at least 70%, 75%, 80%, 85%, 90%, 92%, 95%, 97%, 98%, or 99% sequence identity) thereto; or
[1381] (ii) a nucleotide sequence comprising at least one, two, three, four, five, six, or seven modifications but no more than ten modifications of the nucleotide sequence of SEQ ID NO: 3663.
[1382] 36. The AAV capsid polypeptide, e.g., the AAV capsid variant, of any one of embodiments 1-3, 15-20, 23, 26-28, or 35, wherein the nucleotide sequence encoding the AAV capsid variant comprises:
[1383] (i) the nucleotide sequence of SEQ ID NO: 3663, or a nucleotide sequence substantially identical (e.g., having at least 70%, 75%, 80%, 85%, 90%, 92%, 95%, 97%, 98%, or 99% sequence identity) thereto; or
[1384] (ii) a nucleotide sequence comprising at least one, two, three, four, five, six, or seven modifications but no more than ten modifications of the nucleotide sequence of SEQ ID NO: 3663.
[1385] 37. The AAV capsid polypeptide, e.g., the AAV capsid variant, of any one of embodiments 1-3, 20, or 25-28, comprising an amino acid sequence encoded by:
[1386] (i) the nucleotide sequence of SEQ ID NO: 3664, or a nucleotide sequence substantially identical (e.g., having at least 70%, 75%, 80%, 85%, 90%, 92%, 95%, 97%, 98%, or 99% sequence identity) thereto; or
[1387] (ii) a nucleotide sequence comprising at least one, two, three, four, five, six, or seven modifications but no more than ten modifications of the nucleotide sequence of SEQ ID NO: 3664.
[1388] 38. The AAV capsid polypeptide, e.g., the AAV capsid variant, of any one of embodiments 1-3, 20, 25-28, or 37, wherein the nucleotide encoding the AAV capsid variant comprises:
[1389] (i) the nucleotide sequence of SEQ ID NO: 3664, or a nucleotide sequence substantially identical (e.g., having at least 70%, 75%, 80%, 85%, 90%, 92%, 95%, 97%, 98%, or 99% sequence identity) thereto; or
[1390] (ii) a nucleotide sequence comprising at least one, two, three, four, five, six, or seven modifications but no more than ten modifications of the nucleotide sequence of SEQ ID NO: 3664.
[1391] 39. The AAV capsid polypeptide, e.g., the AAV capsid variant, of any one of the preceding embodiments, wherein the amino acid sequence is present in loop VIII.
[1392] 40. The AAV capsid polypeptide, e.g., the AAV capsid variant, of any one of embodiments 1-10, 20-21, 26-30, or 39, wherein the amino acid sequence is present immediately subsequent to position 586, relative to a reference sequence numbered according to the amino acid sequence of SEQ ID NO: 138.
[1393] 41. The AAV capsid polypeptide, e.g., the AAV capsid variant, of any one of embodiments 1-3, 15-20, 23, 26-28, 35-36, or 39, wherein the amino acid sequence is present immediately subsequent to position 588, relative to a reference sequence numbered according to the amino acid sequence of SEQ ID NO: 138.
[1394] 42. The AAV capsid polypeptide, e.g., the AAV capsid variant, of any one of embodiments 1-3, 11-14, 20, 22, 24-28, 31-34, 37-38, or 39 wherein the amino acid sequence is present immediately subsequent to position 589, relative to a reference sequence numbered according to the amino acid sequence of SEQ ID NO: 138.
[1395] 43. The AAV capsid polypeptide, e.g., the AAV capsid variant of any one of embodiments 1-42, which comprises an amino acid residue other than “A” at position 587 and/or an amino acid residue other than “Q” at position 588, numbered according to SEQ ID NO: 138.
[1396] 44. The AAV capsid polypeptide, e.g., the AAV capsid variant, of any one of embodiments 1-10, 20-21, 26-30, 39-40, or 43, comprising the amino acid sequence of PLNGAVHLY (SEQ ID NO: 3648), wherein the amino acid sequence of PLNGAVHLY (SEQ ID NO: 3648) is present immediately subsequent to position 586, relative to a reference sequence numbered according to the amino acid sequence of SEQ ID NO: 138.
[1397] 45. The AAV capsid polypeptide, e.g., the AAV capsid variant, of any one of embodiments 1-3, 20, 26-28, 39-40, or 43, comprising the amino acid sequence of GGTLAVVSL (SEQ ID NO: 3654), wherein the amino acid sequence of GGTLAVVSL (SEQ ID NO: 3654) is present immediately subsequent to position 586, relative to a reference sequence numbered according to the amino acid sequence of SEQ ID NO: 138.
[1398] 46. The AAV capsid polypeptide, e.g., the AAV capsid variant, of any one of embodiments 1-3, 15-20, 23, 26-28, 35-36, 39, or 41, comprising the amino acid sequence of IVMNSLK (SEQ ID NO: 3651), wherein the amino acid sequence of IVMNSLK (SEQ ID NO: 3651) is present immediately subsequent to position 588, relative to a reference sequence numbered according to the amino acid sequence of SEQ ID NO: 138.
[1399] 47. The AAV capsid polypeptide, e.g., the AAV capsid variant, of any one of embodiments 1-3, 11-14, 20, 22, 24-28, 31-34, 37-38, 39, or 42, comprising the amino acid sequence of any of SEQ ID NOs: 3649, 3650, 3652, 3653, or 3655-3659, wherein the amino acid sequence of any of the aforesaid sequences is present immediately subsequent to position 589, relative to a reference sequence numbered according to the amino acid sequence of SEQ ID NO: 138.
[1400] 48. The AAV capsid polypeptide, e.g., the AAV capsid variant, of any one of the preceding embodiments, which further comprises the amino acid substitution of K449R, numbered according to SEQ ID NO: 138.
[1401] 49. The AAV capsid polypeptide, e.g., the AAV capsid variant, of any one of the preceding embodiments, which further comprises a modification, e.g., an insertion, substitution, and/or deletion, in loop I, II, IV and/or VI.
[1402] 50. The AAV capsid polypeptide, e.g., the AAV capsid variant, of any one of the preceding embodiments, which comprises an amino acid sequence having at least one, two or three modifications but not more than 30, 20 or 10 modifications of the amino acid sequence of SEQ ID NO: 138.
[1403] 51. The AAV capsid polypeptide, e.g., the AAV capsid variant, of any one of the preceding embodiments, which comprises the amino acid sequence of SEQ ID NO: 138, or an amino acid sequence with at least 80% (e.g., at least about 85, 90, 95, 96, 97, 98, or 99%) sequence identity thereto.
[1404] 52. The AAV capsid polypeptide, e.g., the AAV capsid variant, of any one of the preceding embodiments, which comprises the amino acid sequence of SEQ ID NO: 138.
[1405] 53. The AAV capsid polypeptide, e.g., the AAV capsid variant, of any one of the preceding embodiments, which comprises an amino acid sequence encoded by the nucleotide sequence of SEQ ID NO: 137, or a sequence with at least 80% (e.g., at least about 85, 90, 95, 96, 97, 98, or 99%) sequence identity thereto.
[1406] 54. The AAV capsid polypeptide, e.g., the AAV capsid variant, of any one of the preceding embodiments, wherein the nucleotide sequence encoding the capsid variant comprises the nucleotide sequence of SEQ ID NO: 137, or a sequence with at least 80% (e.g., at least about 85, 90, 95, 96, 97, 98, or 99%) sequence identity thereto.
[1407] 55. The AAV capsid polypeptide, e.g., the AAV capsid variant, of any one of the preceding embodiments, which comprises a VP1 protein, a VP2 protein, a VP3 protein, or a combination thereof.
[1408] 56. The AAV capsid polypeptide, e.g., the AAV capsid variant, of any one of the preceding embodiments, which comprises the amino acid sequence corresponding to positions 138-743, e.g., a VP2, of any one of SEQ ID NOs: 3636-3647, or a sequence with at least 80% (e.g., at least about 85, 90, 95, 96, 97, 98, or 99%) sequence identity thereto.
[1409] 57. The AAV capsid polypeptide, e.g., the AAV capsid variant, of any one of the preceding embodiments, which comprises the amino acid sequence corresponding to positions 203-743, e.g., a VP3, of any one of SEQ ID NOs: 3636-3647, or a sequence with at least 80% (e.g., at least about 85, 90, 95, 96, 97, 98, or 99%) sequence identity thereto.
[1410] 58. The AAV capsid polypeptide, e.g., the AAV capsid variant, of any one of the preceding embodiments, which comprises the amino acid sequence of any one of SEQ ID NOs: 3636-3647, or an amino acid sequence with at least 80% (e.g., at least about 85, 90, 95, 96, 97, 98, or 99%) sequence identity thereto.
[1411] 59. The AAV capsid polypeptide, e.g., the AAV capsid variant, of any one of the preceding embodiments, which comprises an amino acid sequence comprising at least one, two or three modifications, but not more than 30, 20 or 10 modifications of the amino acid sequence relative to any one of SEQ ID NOs: 3636-3647.
[1412] 60. The AAV capsid polypeptide, e.g., the AAV capsid variant, of any one of the preceding embodiments, which comprises an amino acid sequence encoded by the nucleotide sequence of any one of SEQ ID NOs: 3623-3635, or a nucleotide sequence with at least 80% (e.g., at least about 85, 90, 95, 96, 97, 98, or 99%) sequence identity thereto.
[1413] 61. The AAV capsid polypeptide, e.g., the AAV capsid variant, of any one of the preceding embodiments, wherein the nucleotide sequence encoding the capsid variant comprises the nucleotide sequence of any one of SEQ ID NOs: 3623-3635, or a nucleotide sequence with at least 80% (e.g., at least about 85, 90, 95, 96, 97, 98, or 99%) sequence identity thereto.
[1414] 62. The AAV capsid polypeptide, e.g., the AAV capsid variant, of any one of embodiments 1-10, 20-21, 26-30, 39-40, 43-44, or 48-61, wherein the nucleotide sequence encoding the capsid variant comprises the nucleotide sequence of SEQ ID NO: 3623, or a nucleotide sequence with at least 80% (e.g., at least about 85, 90, 95, 96, 97, 98, or 99%) sequence identity thereto.
[1415] 63. The AAV capsid polypeptide, e.g., the AAV capsid variant, of any one of embodiments 1-3, 15-20, 23, 26-28, 35-36, 39, 41, 46, or 48-61, wherein the nucleotide sequence encoding the capsid variant comprises the nucleotide sequence of SEQ ID NO: 3627, or a nucleotide sequence with at least 80% (e.g., at least about 85, 90, 95, 96, 97, 98, or 99%) sequence identity thereto.
[1416] 64. The AAV capsid polypeptide, e.g., the AAV capsid variant, of any one of the preceding embodiments, wherein the nucleotide sequence encoding the capsid variant is codon optimized.
[1417] 65. An AAV capsid polypeptide, e.g., an AAV capsid variant, comprising the amino acid sequence of any one of embodiments 1-10, 20-21, 26-30, 39-40, 43-44, 48-62, or 64, and further comprising an amino acid sequence at least 95% identical to SEQ ID NO: 3636.
[1418] 66. An AAV capsid polypeptide, e.g., an AAV capsid variant, comprising the amino acid sequence of SEQ ID NO: 3636, and optionally wherein the AAV capsid variant further comprises one, two, or all of an amino acid other than T at position 593 (e.g., a V, S, L, R, I, A, N, C, Q, M, P, or K), an amino acid other than G at position 594 (e.g., T, M, A, K, S, Q, V, I, R, N, P, L, H, or Y), and/or an amino acid other than W at position 595 (e.g., K, Q, S, P, C, A, G, N, T, R, V, M, H, L, E, F, or Y), relative to a reference sequence numbered according to the amino acid sequence of SEQ ID NO: 138.
[1419] 67. An AAV capsid polypeptide, e.g., an AAV capsid variant, comprising the amino acid sequence of any one of embodiments 1-3, 20, 22, 26-28, 31-32, 39, 42, 47-61, or 64, and further comprising an amino acid sequence at least 95% identical to SEQ ID NO: 3637.
[1420] 68. An AAV capsid polypeptide, e.g., an AAV capsid variant, comprising the amino acid sequence of SEQ ID NO: 3637.
[1421] 69. An AAV capsid polypeptide, e.g., an AAV capsid variant, comprising the amino acid sequence of any one of embodiments 1-3, 11-12, 20, 24, 26-28, 33-34, 39, 42, 47-61, or 64, and further comprising an amino acid sequence at least 95% identical to SEQ ID NO: 3638.
[1422] 70. An AAV capsid polypeptide, e.g., an AAV capsid variant, comprising the amino acid sequence of SEQ ID NO: 3638.
[1423] 71. An AAV capsid polypeptide, e.g., an AAV capsid variant, comprising the amino acid sequence of any one of embodiments 1-3, 15-20, 23, 26-28, 35-36, 39, 41, 46, 48-61, or 63-64, and further comprising an amino acid sequence at least 95% identical to SEQ ID NO: 3639.
[1424] 72. An AAV capsid polypeptide, e.g., an AAV capsid variant, comprising the amino acid sequence of SEQ ID NO: 3639.
[1425] 73. An AAV capsid polypeptide, e.g., an AAV capsid variant, comprising the amino acid sequence of any one of embodiments 1-3, 20, 25-28, 37-39, 42, 47-61, or 64, and further comprising an amino acid sequence at least 95% identical to SEQ ID NO: 3640.
[1426] 74. An AAV capsid polypeptide, e.g., an AAV capsid variant, comprising the amino acid sequence of SEQ ID NO: 3640.
[1427] 75. An AAV capsid polypeptide, e.g., an AAV capsid variant, comprising the amino acid sequence of SEQ ID NO: 3641.
[1428] 76. An AAV capsid polypeptide, e.g., an AAV capsid variant, comprising the amino acid sequence of SEQ ID NO: 3642.
[1429] 77. An AAV capsid polypeptide, e.g., an AAV capsid variant, comprising the amino acid sequence of SEQ ID NO: 3643.
[1430] 78. An AAV capsid polypeptide, e.g., an AAV capsid variant, comprising the amino acid sequence of SEQ ID NO: 3644.
[1431] 79. An AAV capsid polypeptide, e.g., an AAV capsid variant, comprising the amino acid sequence of SEQ ID NO: 3645.
[1432] 80. An AAV capsid polypeptide, e.g., an AAV capsid variant, comprising the amino acid sequence of SEQ ID NO: 3646.
[1433] 81. An AAV capsid polypeptide, e.g., an AAV capsid variant, comprising the amino acid sequence of SEQ ID NO: 3647.
[1434] 82. An AAV capsid polypeptide, e.g., an AAV capsid variant, comprising an amino acid sequence encoded by the nucleotide sequence of any one of SEQ ID NOs: 3623-3635, or a nucleotide sequence at least 95% identical thereto, and optionally wherein the AAV capsid variant further comprises one, two, or all of an amino acid other than T at position 593 (e.g., a V, S, L, R, I, A, N, C, Q, M, P, or K), an amino acid other than G at position 594 (e.g., T, M, A, K, S, Q, V, I, R, N, P, L, H, or Y), and/or an amino acid other than W at position 595 (e.g., K, Q, S, P, C, A, G, N, T, R, V, M, H, L, E, F, or Y), relative to a reference sequence numbered according to the amino acid sequence of SEQ ID NO: 138.
[1435] 83. The AAV capsid polypeptide, e.g., the AAV capsid variant, of any one of the preceding embodiments, which does not comprise an insert sequence present immediately subsequent to position 586, 588, or 589 numbered relative to SEQ ID NO: 138, having at least 5 consecutive amino acids corresponding to positions 586 to 594 numbered relative to SEQ ID NO: 138, of any of SEQ ID NOs: 1-1724, e.g., as described in Table 1 of WO2020223276.
[1436] 84. The AAV capsid polypeptide, e.g., the AAV capsid variant, of any one of the preceding embodiments, which does not comprise the amino acid sequence of TLAVPFK (SEQ ID NO: 1262) present immediately subsequent to position 588, numbered according to SEQ ID NO: 138.
[1437] 85. The AAV capsid polypeptide, e.g., the AAV capsid variant, of any one of the preceding embodiments, which has an increased tropism for a CNS cell or tissue, e.g., a brain cell, brain tissue, spinal cord cell, or spinal cord tissue, relative to the tropism of a reference sequence comprising the amino acid sequence of SEQ ID NO: 138.
[1438] 86. The AAV capsid polypeptide, e.g., the AAV capsid variant, of any one of embodiments 1-12, 15-44, 46-74, 82-85, which transduces a brain region, e.g., selected from dentate nucleus, cerebellar cortex, cerebral cortex, brain stem, hippocampus, thalamus and putamen, optionally wherein the level of transduction is at least 5, 10, 50, 100, 200, 500, 1,000, 2,000, 5,000, or 10,000-fold greater as compared to a reference sequence of SEQ ID NO: 138, e.g., when measured by an assay, e.g., an immunohistochemistry assay, a qRT-PCR, or a RT-ddPCR assay, e.g., as described in Example 5.
[1439] 87. The AAV capsid polypeptide, e.g., the AAV capsid variant, of any one of the preceding embodiments, which is enriched at least about 5, 6, 7, 8, 9, or 10-fold, in the brain compared to a reference sequence of SEQ ID NO: 138, e.g., when measured by an assay as described in Example 4.
[1440] 88. The AAV capsid polypeptide, e.g., the AAV capsid variant, of any one of embodiments 1-14, 20-22, 24-34, 39-40, 42-44, 47-62, 64-70, 79-80, 82-87, which is enriched at least about 20, 30, 40, or 50-fold in the brain compared to a reference sequence of SEQ ID NO: 138, e.g., when measured by an assay as described in Example 4.
[1441] 89. The AAV capsid polypeptide, e.g., the AAV capsid variant, of any one of embodiments 1-10, 20-22, 26-32, 39-40, 42-44, 47-62, 64-68, 82-88, which is enriched at least about 100, 200, 300, or 400-fold in the brain compared to a reference sequence of SEQ ID NO: 138, e.g., when measured by an assay as described in Example 4.
[1442] 90. The AAV capsid polypeptide, e.g., the AAV capsid variant, of any one of embodiments 1-10, 20-21, 26-30, 39-40, 43-44, 48-62, 64-66, 82-89, which delivers an increased level of viral genomes to a brain region, optionally wherein the level of viral genomes is increased by at least 5, 10, 20, 30, 40 or 50-fold, as compared to a reference sequence of SEQ ID NO: 138, e.g., when measured by an assay, e.g., a qRT-PCR or a RT-ddPCR assay (e.g., as described in Example 5).
[1443] 91. The AAV capsid polypeptide, e.g., the AAV capsid variant, of any one of embodiments 1-12, 15-44, 46-74, 82-90, which delivers an increased level of a payload to a brain region, optionally wherein the level of the payload is increased by at least 5, 10, 50, 100, 200, 500, 1,000, 2,000, 5,000, or 10,000-fold, as compared to a reference sequence of SEQ ID NO: 138, e.g., when measured by an assay, e.g., a qRT-PCR or a RT-ddPCR assay (e.g., as described in Example 5).
[1444] 92. The AAV capsid polypeptide, e.g., the AAV capsid variant, of embodiment 91, wherein the brain region comprises a frontal cortex, sensory cortex, motor cortex, putamen, thalamus, cerebellar cortex, dentate nucleus, caudate, and/or hippocampus.
[1445] 93. The AAV capsid polypeptide, e.g., the AAV capsid variant, of any one of embodiments 1-12, 15-44, 46-74, 82-92, which delivers an increased level of a payload to a spinal cord region, optionally wherein the level of the payload is increased by at least 10, 20, 50, 100, 200, 300, 400, 500, 600, 700, 800 or 900-fold, as compared to a reference sequence of SEQ ID NO: 138, e.g., when measured by an assay, e.g., a qRT-PCR assay (e.g., as described in Example 5).
[1446] 94. The AAV capsid polypeptide, e.g., the AAV capsid variant, of embodiment 93, wherein the spinal cord region comprises a cervical, thoracic, and/or lumbar region.
[1447] 95. The AAV capsid polypeptide, e.g., the AAV capsid variant, of any one of embodiments 1-3, 15-20, 23, 26-28, 35-36, 39, 41, 46, 48-61, 63-64, 71-72, 82-87, or 91-94, which shows preferential transduction in a brain region relative to the transduction in the dorsal root ganglia (DRG).
[1448] 96. The AAV capsid polypeptide, e.g., the AAV capsid variant, of any one of embodiments 1-10, 20-21, 26-30, 39-40, 43-44, 48-62, 64-66, 82-94, wherein the capsid variant:
[1449] (i) is enriched at least about 300, or 400-fold in the brain compared to a reference sequence of SEQ ID NO: 138, e.g., when measured by an assay as described in Example 4;
[1450] (ii) transduces a brain region, e.g., selected from dentate nucleus, cerebellar cortex, cerebral cortex, brain stem, hippocampus, thalamus and putamen, wherein the level of transduction is at least 500, 1,000, 2,000, 5,000, or 10,000-fold greater as compared to a reference sequence of SEQ ID NO: 138, e.g., when measured by an assay, e.g., an immunohistochemistry assay, a qRT-PCR, or a RT-ddPCR assay, e.g., as described in Example 5;
[1451] (iii) delivers an increased level of a payload to a brain region, optionally wherein the level of the payload is increased by at least 500, 1,000, 2,000, 5,000, or 10,000-fold, as compared to a reference sequence of SEQ ID NO: 138, e.g., when measured by an assay, e.g., a qRT-PCR or a RT-ddPCR assay (e.g., as described in Example 5), optionally wherein the brain region comprises a frontal cortex, sensory cortex, motor cortex, putamen, thalamus, cerebellar cortex, dentate nucleus, caudate, and/or hippocampus;
[1452] (iv) delivers an increased level of a payload to a spinal cord region, optionally wherein the level of the payload is increased by at least 50, 100, 200, 300, 400, 500, 600, 700, 800 or 900-fold, as compared to a reference sequence of SEQ ID NO: 138, e.g., when measured by an assay, e.g., a qRT-PCR assay (e.g., as described in Example 5), optionally wherein the spinal cord region comprises a cervical, thoracic, and/or lumbar region; and/or
[1453] (v) delivers an increased level of viral genomes to a brain region, optionally wherein the level of viral genomes is increased by at least 5, 10, 20, 30, 40 or 50-fold, as compared to a reference sequence of SEQ ID NO: 138, e.g., when measured by an assay, e.g., a qRT-PCR or a RT-ddPCR assay (e.g., as described in Example 5), optionally wherein the brain region comprises a frontal cortex, sensory cortex, motor cortex, putamen, thalamus, cerebellar cortex, dentate nucleus, caudate, and/or hippocampus.
[1454] 97. An AAV capsid polypeptide, e.g., an AAV capsid variant comprising: (a) the amino acid sequence of PLNGAVHLY (SEQ ID NO: 3648); (b) an amino acid sequence comprising at least one, two, or three modifications but no more than four modifications, e.g., substitutions, relative to the amino acid sequence of PLNGAVHLY (SEQ ID NO: 3648); or (c) at least 3, 4, 5, 6, 7, 8, or 9 consecutive amino acids from the amino acid sequence of PLNGAVHLY (SEQ ID NO: 3648); and wherein the capsid variant:
[1455] (i) is enriched at least about 300 or 400-fold in the brain compared to a reference sequence of SEQ ID NO: 138, e.g., when measured by an assay as described in Example 4;
[1456] (ii) transduces a brain region, e.g., selected from dentate nucleus, cerebellar cortex, cerebral cortex, brain stem, hippocampus, thalamus and putamen, wherein the level of transduction is at least 500, 1,000, 2,000, 5,000, or 10,000-fold greater as compared to a reference sequence of SEQ ID NO: 138, e.g., when measured by an assay, e.g., an immunohistochemistry assay, a qRT-PCR, or a RT-ddPCR assay, e.g., as described in Example 5;
[1457] (iii) delivers an increased level of a payload to a brain region, optionally wherein the level of the payload is increased by at least 500, 1,000, 2,000, 5,000, or 10,000-fold, as compared to a reference sequence of SEQ ID NO: 138, e.g., when measured by an assay, e.g., a qRT-PCR or a RT-ddPCR assay (e.g., as described in Example 5), optionally wherein the brain region comprises a frontal cortex, sensory cortex, motor cortex, putamen, thalamus, cerebellar cortex, dentate nucleus, caudate, and/or hippocampus;
[1458] (iv) delivers an increased level of a payload to a spinal cord region, optionally wherein the level of the payload is increased by at least 50, 100, 200, 300, 400, 500, 600, 700, 800 or 900-fold, as compared to a reference sequence of SEQ ID NO: 138, e.g., when measured by an assay, e.g., a qRT-PCR assay (e.g., as described in Example 5), optionally wherein the spinal cord region comprises a cervical, thoracic, and/or lumbar region; and/or
[1459] (v) delivers an increased level of viral genomes to a brain region, optionally wherein the level of viral genomes is increased by at least 5, 10, 20, 30, 40 or 50-fold, as compared to a reference sequence of SEQ ID NO: 138, e.g., when measured by an assay, e.g., a qRT-PCR or a RT-ddPCR assay (e.g., as described in Example 5), optionally wherein the brain region comprises a frontal cortex, sensory cortex, motor cortex, putamen, thalamus, cerebellar cortex, dentate nucleus, caudate, and/or hippocampus; and
[1460] optionally wherein the AAV capsid variant further comprises one, two, or all of an amino acid other than T at position 593 (e.g., a V, S, L, R, I, A, N, C, Q, M, P, or K), an amino acid other than G at position 594 (e.g., T, M, A, K, S, Q, V, I, R, N, P, L, H, or Y), and/or an amino acid other than W at position 595 (e.g., K, Q, S, P, C, A, G, N, T, R, V, M, H, L, E, F, or Y), relative to a reference sequence numbered according to the amino acid sequence of SEQ ID NO: 138.
[1461] 98. The AAV capsid polypeptide, e.g., the AAV capsid variant, of any one of embodiments 1-3, 15-20, 23, 26-28, 35-36, 39, 41, 46, 48-61, 63-64, 71-72, 82-87, or 91-95, wherein the AAV capsid variant has an increased tropism for a muscle cell or tissue, e.g., a heart tissue, relative to the tropism of a reference sequence comprising the amino acid sequence of SEQ ID NO: 138.
[1462] 99. The AAV capsid polypeptide, e.g., the AAV capsid variant, of any one of embodiments 1-3, 15-20, 23, 26-28, 35-36, 39, 41, 46, 48-61, 63-64, 71-72, 82-87, 92-95, or 98, which delivers an increased level of a payload to a muscle region, optionally wherein the level of the payload is increased by at least 10, 15, 20, 30, or 40-fold, as compared to a reference sequence of SEQ ID NO: 138, e.g., when measured by an assay, e.g., an IHC assay or a RT-ddPCR assay (e.g., as described in Example 5).
[1463] 100. The AAV capsid polypeptide, e.g., the AAV capsid variant, of embodiment 98 or 99, wherein the muscle region comprises a heart muscle, quadriceps muscle, and/or a diaphragm muscle region.
[1464] 101. The AAV capsid polypeptide, e.g., the AAV capsid variant, of any one of embodiments 98-100, wherein the muscle region comprises a heart muscle region, e.g., a heart atrium muscle region or a heart ventricle muscle region.
[1465] 102. The AAV capsid polypeptide, e.g., the AAV capsid variant, of any one of the preceding embodiments, which is isolated, e.g., recombinant.
[1466] 103. A polynucleotide encoding the polypeptide, e.g., the AAV capsid variant of any one of embodiments 1-102.
[1467] 104. The polynucleotide of embodiment 103, which comprises:
[1468] (i) a nucleotide sequence comprising at least one, two, three, four, five, six, or seven modifications but no more than ten modifications of the nucleotide sequences of any of SEQ ID NOs: 3660-3671; or
[1469] (ii) the nucleotide sequence of any one of SEQ ID NOs: 3660-3671, or nucleotide sequence substantially identical (e.g., having at least 70%, 75%, 80%, 85%, 90%, 92%, 95%, 97%, 98%, or 99% sequence identity) thereto.
[1470] 105. The polynucleotide of embodiment 103 or 104, which comprises the nucleotide sequence of any one of SEQ ID NOs: 3623-3635, or a nucleotide sequence with at least 80% (e.g., at least about 85, 90, 95, 96, 97, 98, or 99%) sequence identity thereto.
[1471] 106. The polynucleotide of any one of embodiments 125-127, which comprises a nucleotide sequence that is codon optimized.
[1472] 107. A peptide comprising:
[1473] (a) the amino acid sequence of any of SEQ ID NO: 1725-3622 or 3648-3659;
[1474] (b) an amino acid sequence comprising no more than four modifications, e.g., substitutions, relative to the amino acid sequence of any of SEQ ID NO: 1725-3622 or 3648-3659; or
[1475] (c) at least 3, 4, 5, 6, 7, 8, or 9 consecutive amino acids from the amino acid sequence of any of SEQ ID NO: 1725-3622 or 3648-3659.
[1476] 108. An AAV capsid polypeptide, e.g., an AAV capsid variant, comprising the peptide of embodiment 107.
[1477] 109. A polynucleotide encoding the peptide of embodiment 107.
[1478] 110. A polynucleotide encoding an AAV capsid polypeptide, e.g., an AAV capsid variant comprising:
[1479] (a) the amino acid sequence of any of SEQ ID NO: 1725-3622 or 3648-3659;
[1480] (b) an amino acid sequence comprising no more than four modifications, e.g., substitutions, relative to the amino acid sequence of any of SEQ ID NO: 1725-3622 or 3648-3659; or
[1481] (c) at least 3, 4, 5, 6, 7, 8, or 9 consecutive amino acids from the amino acid sequence of any of SEQ ID NO: 1725-3622 or 3648-3659;
[1482] optionally wherein:
[1483] (i) the amino acid sequence of (a), (b), and/or (c) is present immediately subsequent to position 586, 588, or 589, relative to a reference sequence numbered according to the amino acid sequence of SEQ ID NO: 138; and/or
[1484] (ii) the encoded AAV capsid polypeptide, e.g., an AAV capsid variant, further comprises one, two, or all of an amino acid other than T at position 593 (e.g., a V, S, L, R, I, A, N, C, Q, M, P, or K), an amino acid other than G at position 594 (e.g., T, M, A, K, S, Q, V, I, R, N, P, L, H, or Y), and/or an amino acid other than W at position 595 (e.g., K, Q, S, P, C, A, G, N, T, R, V, M, H, L, E, F, or Y), relative to a reference sequence numbered according to the amino acid sequence of SEQ ID NO: 138.
[1485] 111. A polynucleotide encoding an AAV capsid polypeptide, e.g., an AAV capsid variant, wherein the AAV capsid variant comprises:
[1486] (i) the amino acid sequence of PLNGAVHLY (SEQ ID NO: 3648);
[1487] (ii) an amino acid sequence comprising at least one, two, or three modifications but no more than four modifications, e.g., substitutions, relative to the amino acid sequence of PLNGAVHLY (SEQ ID NO: 3648); or
[1488] (iii) at least 3, 4, 5, 6, 7, 8, or 9 consecutive amino acids from the amino acid sequence of PLNGAVHLY (SEQ ID NO: 3648);
[1489] optionally wherein:
[1490] (i) the amino acid sequence of (i), (ii), and/or (iii) is present immediately subsequent to position 586, relative to a reference sequence numbered according to the amino acid sequence of SEQ ID NO: 138;
[1491] (ii) the encoded AAV capsid polypeptide, e.g., an AAV capsid variant, further comprises one, two, or all of an amino acid other than T at position 593 (e.g., a V, S, L, R, I, A, N, C, Q, M, P, or K), an amino acid other than G at position 594 (e.g., T, M, A, K, S, Q, V, I, R, N, P, L, H, or Y), and/or an amino acid other than W at position 595 (e.g., K, Q, S, P, C, A, G, N, T, R, V, M, H, L, E, F, or Y), relative to a reference sequence numbered according to the amino acid sequence of SEQ ID NO: 138.
[1492] 112. The polynucleotide of embodiment 111, which comprises:
[1493] (i) the nucleotide sequence of SEQ ID NO: 3660 or a nucleotide sequence substantially identical (e.g., having at least 70%, 75%, 80%, 85%, 90%, 92%, 95%, 97%, 98%, or 99% sequence identity) thereto; or
[1494] (ii) a nucleotide sequence comprising at least one, two, three, four, five, six, or seven modifications but no more than ten modifications of the nucleotide sequence of SEQ ID NO: 3660.
[1495] 113. A polynucleotide encoding an AAV capsid polypeptide, e.g., an AAV capsid variant, wherein the AAV capsid variant comprises:
[1496] (i) the amino acid sequence of IVMNSLK (SEQ ID NO: 3651);
[1497] (ii) an amino acid sequence comprising at least one, two, or three modifications but no more than four modifications, e.g., substitutions, relative to the amino acid sequence of IVMNSLK (SEQ ID NO: 3651); or
[1498] (iii) at least 3, 4, 5, 6, 7, 8, or 9 consecutive amino acids from the amino acid sequence of IVMNSLK (SEQ ID NO: 3651);
[1499] optionally wherein the amino acid sequence of (i), (ii), and/or (iii) is present immediately subsequent to position 588, relative to a reference sequence numbered according to the amino acid sequence of SEQ ID NO: 138.
[1500] 114. The polynucleotide of embodiment 113, which comprises:
[1501] (i) the nucleotide sequence of SEQ ID NO: 3663, or a nucleotide sequence substantially identical (e.g., having at least 70%, 75%, 80%, 85%, 90%, 92%, 95%, 97%, 98%, or 99% sequence identity) thereto; or
[1502] (ii) a nucleotide sequence comprising at least one, two, three, four, five, six, or seven modifications but no more than ten modifications of the nucleotide sequence of SEQ ID NO: 3663.
[1503] 115. A polynucleotide encoding an AAV capsid polypeptide, e.g., an AAV capsid variant, wherein the AAV capsid variant comprises:
[1504] (i) the amino acid sequence of RDSPKGW (SEQ ID NO: 3649);
[1505] (ii) an amino acid sequence comprising at least one, two, or three modifications but no more than four modifications, e.g., substitutions, relative to the amino acid sequence of RDSPKGW (SEQ ID NO: 3649); or
[1506] (iii) at least 3, 4, 5, 6, 7, 8, or 9 consecutive amino acids from the amino acid sequence of RDSPKGW (SEQ ID NO: 3649);
[1507] optionally wherein the amino acid sequence of (i), (ii), and/or (iii) is present immediately subsequent to position 589, relative to a reference sequence numbered according to the amino acid sequence of SEQ ID NO: 138.
[1508] 116. The polynucleotide of embodiment 115, which comprises:
[1509] (i) the nucleotide sequence of SEQ ID NO: 3661, or a nucleotide sequence substantially identical (e.g., having at least 70%, 75%, 80%, 85%, 90%, 92%, 95%, 97%, 98%, or 99% sequence identity) thereto; or
[1510] (ii) a nucleotide sequence comprising at least one, two, three, four, five, six, or seven modifications but no more than ten modifications of the nucleotide sequence of SEQ ID NO: 3661.
[1511] 117. A polynucleotide encoding an AAV capsid polypeptide, e.g., an AAV capsid variant, wherein the AAV capsid variant comprises:
[1512] (i) the amino acid sequence of YSTDVRM (SEQ ID NO: 3650);
[1513] (ii) an amino acid sequence comprising at least one, two, or three modifications but no more than four modifications, e.g., substitutions, relative to the amino acid sequence of YSTDVRM (SEQ ID NO: 3650); or
[1514] (iii) at least 3, 4, 5, 6, 7, 8, or 9 consecutive amino acids from the amino acid sequence of YSTDVRM (SEQ ID NO: 3650);
[1515] optionally wherein the amino acid sequence of (i), (ii), and/or (iii) is present immediately subsequent to position 589, relative to a reference sequence numbered according to the amino acid sequence of SEQ ID NO: 138.
[1516] 118. The polynucleotide of embodiment 117, which comprises:
[1517] (i) the nucleotide sequence of SEQ ID NO: 3662, or a nucleotide sequence substantially identical (e.g., having at least 70%, 75%, 80%, 85%, 90%, 92%, 95%, 97%, 98%, or 99% sequence identity) thereto; or
[1518] (ii) a nucleotide sequence comprising at least one, two, three, four, five, six, or seven modifications but no more than ten modifications of the nucleotide sequence of SEQ ID NO: 3662.
[1519] 119. A polynucleotide encoding an AAV capsid polypeptide, e.g., an AAV capsid variant, wherein the AAV capsid variant comprises:
[1520] (i) the amino acid sequence of RESPRGL (SEQ ID NO: 3652);
[1521] (ii) an amino acid sequence comprising at least one, two, or three modifications but no more than four modifications, e.g., substitutions, relative to the amino acid sequence of RESPRGL (SEQ ID NO: 3652); or
[1522] (iii) at least 3, 4, 5, 6, 7, 8, or 9 consecutive amino acids from the amino acid sequence of RESPRGL (SEQ ID NO: 3652);
[1523] optionally wherein the amino acid sequence of (i), (ii), and/or (iii) is present immediately subsequent to position 589, relative to a reference sequence numbered according to the amino acid sequence of SEQ ID NO: 138.
[1524] 120. The polynucleotide of embodiment 119, which comprises:
[1525] (i) the nucleotide sequence of SEQ ID NO: 3664, or a nucleotide sequence substantially identical (e.g., having at least 70%, 75%, 80%, 85%, 90%, 92%, 95%, 97%, 98%, or 99% sequence identity) thereto; or
[1526] (ii) a nucleotide sequence comprising at least one, two, three, four, five, six, or seven modifications but no more than ten modifications of the nucleotide sequence of SEQ ID NO: 3664.
[1527] 121. The polynucleotide of any one of embodiments 109-120, wherein the AAV capsid variant comprises:
[1528] (i) the amino acid sequence of any one of SEQ ID NOs: 3636-3647, or an amino acid sequence with at least 80% (e.g., at least about 85, 90, 95, 96, 97, 98, or 99%) sequence identity thereto; or
[1529] (ii) an amino acid sequence having at least one, two or three modifications but not more than 30, 20 or 10 modifications of the amino acid sequence of any one of SEQ ID NOs: 3636-3647.
[1530] 122. The polynucleotide of any one of embodiments 109-121, comprising the nucleotide sequence of any one of SEQ ID NOs: 3623-3635, or a nucleotide sequence with at least 80% (e.g., at least about 85, 90, 95, 96, 97, 98, or 99%) sequence identity thereto.
[1531] 123. The polynucleotide, peptide, or AAV capsid polypeptide, e.g., AAV capsid variant, of any one of embodiments 103-122, which is isolated, e.g., recombinant.
[1532] 124. An AAV particle comprising the AAV capsid polypeptide, e.g., the AAV capsid variant, of any one of embodiments 1-102 or 108.
[1533] 125. The AAV particle of embodiment 124, which comprises a nucleotide sequence encoding a payload.
[1534] 126. The AAV particle of embodiment 125, wherein the encoded payload comprises a therapeutic protein or functional variant thereof; an antibody or antibody fragment; an enzyme; a component of a gene editing system; an RNAi agent (e.g., a dsRNA, siRNA, shRNA, pre-miRNA, pri-miRNA, miRNA, stRNA, lncRNA, piRNA, or snoRNA); or a combination thereof.
[1535] 127. The AAV particle of embodiment 126, wherein the therapeutic protein or functional variant thereof, e.g., a recombinant protein, is associated with (e.g., aberrantly expressed in) a neurological or neurodegenerative disorder, a muscular or neuromuscular disorder, or a neuro-oncological disorder.
[1536] 128. The AAV particle of embodiment 126 or 127, the therapeutic protein or functional variant thereof is chosen from apolipoprotein E (APOE) (e.g., ApoE2, ApoE3 and/or ApoE4); human survival of motor neuron (SMN) 1 or SMN2; glucocerebrosidase (GBA1); aromatic L-amino acid decarboxylase (AADC); aspartoacylase (ASPA); tripeptidyl peptidase I (CLN2); beta-galactosidase (GLB1); N-sulphoglucosamine sulphohydrolase (SGSH); N-acetyl-alpha-glucosaminidase (NAGLU); iduronate 2-sulfatase (IDS); intracellular cholesterol transporter (NPC1); gigaxonin (GAN); or a combination thereof.
[1537] 129. The AAV particle of embodiment 126, wherein the antibody or antibody binding fragment binds to:
[1538] (i) a CNS related target, e.g., an antigen associated with a neurological or neurodegenerative disorder, e.g., β-amyloid, APOE, tau, SOD1, TDP-43, huntingtin (HTT), and/or synuclein;
[1539] (ii) a muscular or neuromuscular related target, e.g., an antigen associated with a muscular or neuromuscular disorder; or
[1540] (iii) a neuro-oncology related target, e.g., an antigen associated with a neuro-oncological disorder, e.g., HER2, or EGFR (e.g., EGFRvIII).
[1541] 130. The AAV particle of embodiment 126, wherein the enzyme comprises a meganuclease, a zinc finger nuclease, a TALEN, a recombinase, integrase, a base editor, a Cas9, or a fragment thereof.
[1542] 131. The AAV particle of embodiment 126, wherein the component of a gene editing system comprises one or more components of a CRISPR-Cas system.
[1543] 132. The AAV particle of embodiment 126 or 131, wherein the one or more components of the CRISPR-Cas system comprises a Cas9, e.g., a Cas9 ortholog or a Cpf1, and a single guide RNA (sgRNA), optionally wherein:
[1544] (i) the sgRNA is located upstream (5′) of the cas9 enzyme; or
[1545] (ii) the sgRNA is located downstream (3′) of the cas9 enzyme.
[1546] 133. The AAV particle of embodiment 126, wherein the RNAi agent (e.g., a dsRNA, siRNA, shRNA, pre-miRNA, pri-miRNA, miRNA, stRNA, lncRNA, piRNA, or snoRNA), modulates, e.g., inhibits, expression of, a CNS related gene, mRNA, and/or protein.
[1547] 134. The AAV particle of embodiment 133, wherein the CNS related gene is chosen from SOD1, MAPT, APOE, HTT, C9ORF72, TDP-43, APP, BACE, SNCA, ATXN1, ATXN3, ATXN7, SCN1A-SCN5A, SCN8A-SCN11A, or a combination thereof.
[1548] 135. The AAV particle of any one of embodiments 124-134, which comprises a viral genome comprising a promoter operably linked to the nucleic acid sequence encoding the payload.
[1549] 136. The AAV particle of embodiment 135, wherein the promoter is chosen from human elongation factor 1α-subunit (EF1α), cytomegalovirus (CMV) immediate-early enhancer and/or promoter, chicken β-actin (CBA) and its derivative CAG, β glucuronidase (GUSB), or ubiquitin C (UBC), neuron-specific enolase (NSE), platelet-derived growth factor (PDGF), platelet-derived growth factor B-chain (PDGF-$), intercellular adhesion molecule 2 (ICAM-2), synapsin (Syn), methyl-CpG binding protein 2 (MeCP2), Ca2+/calmodulin-dependent protein kinase II (CaMKII), metabotropic glutamate receptor 2 (mGluR2), neurofilament light (NFL) or heavy (NFH), β-globin minigene nP2, preproenkephalin (PPE), enkephalin (Enk) and excitatory amino acid transporter 2 (EAAT2), glial fibrillary acidic protein (GFAP), myelin basic protein (MBP), a cardiovascular promoter (e.g., αMHC, cTnT, and CMV-MLC2k), a liver promoter (e.g., hAAT, TBG), a skeletal muscle promoter (e.g., desmin, MCK, C512) or a fragment, e.g., a truncation, or a functional variant thereof.
[1550] 137. The AAV particle of any one of embodiments 135 or 136, wherein the viral genome further comprises a polyA signal sequence.
[1551] 138. The AAV particle of any one of embodiments 135-137, wherein the viral genome further comprises an inverted terminal repeat (ITR) sequence.
[1552] 139. The AAV particle of any one of embodiments 135-138, wherein the viral genome comprises an ITR sequence positioned 5′ relative to the encoded payload.
[1553] 140. The AAV particle of any one of embodiments 135-139, wherein the viral genome comprises an ITR sequence positioned 3′ relative to the encoded payload.
[1554] 141. The AAV particle of any one of embodiments 135-140, wherein the viral genome comprises an ITR sequence positioned 5′ relative to the encoded payload and an ITR sequence positioned 3′ relative to the encoded payload.
[1555] 142. The AAV particle of any one of embodiments 135-141, wherein the viral genome further comprises an enhancer, a Kozak sequence, an intron region, and/or an exon region.
[1556] 143. The AAV particle of any one of embodiments 135-142, wherein the viral genome further comprises a miR binding site, e.g., a miR binding site that modulates, e.g., reduces, expression of the payload encoded by the viral genome in a cell or tissue where the corresponding miRNA is expressed.
[1557] 144. The AAV particle of any one of embodiments 135-143, wherein the viral genome comprises at least 1-5 copies of a miR binding site, e.g., at least 1, 2, 3, 4, or 5 copies.
[1558] 145. The AAV particle of any one of embodiments 135-144, wherein the viral genome comprises at least 3 copies of a miR binding site, optionally wherein all three copies comprise the same miR binding site, or at least one, two, or all of the copies comprise a different miR binding site.
[1559] 146. The AAV particle of any one of embodiments 135-144, wherein the viral genome comprises at least 4 copies of a miR binding site, optionally wherein all four copies comprise the same miR binding site, or at least one, two, three, or all of the copies comprise a different miR binding site.
[1560] 147. The AAV particle of any one of embodiments 143-146, wherein the miR binding site comprises a miR122 binding site, a miR183 binding site, a miR-142-3p, or a combination thereof, optionally wherein:
[1561] (i) the miR122 binding site comprises the nucleotide sequence of SEQ ID NO: 3672, or a nucleotide sequence substantially identical (e.g., having at least 70%, 75%, 80%, 85%, 90%, 92%, 95%, 97%, 98%, or 99% sequence identity) thereto; or a nucleotide sequence having at least one, two, three, four, five, six, or seven modifications, but no more than ten modifications of SEQ ID NO: 3672;
[1562] (ii) the miR183 binding site comprises the nucleotide sequence of SEQ ID NO: 3675, or a nucleotide sequence substantially identical (e.g., having at least 70%, 75%, 80%, 85%, 90%, 92%, 95%, 97%, 98%, or 99% sequence identity) thereto; or a nucleotide sequence having at least one, two, three, four, five, six, or seven modifications, but no more than ten modifications of SEQ ID NO: 3675; and/or
[1563] (iii) the miR-142-3p binding site comprises the nucleotide sequence of SEQ ID NO: 3674, or a nucleotide sequence substantially identical (e.g., having at least 70%, 75%, 80%, 85%, 90%, 92%, 95%, 97%, 98%, or 99% sequence identity) thereto; or a nucleotide sequence having at least one, two, three, four, five, six, or seven modifications, but no more than ten modifications of SEQ ID NO: 3674.
[1564] 148. The AAV particle of any one of embodiments 135-147, wherein the viral genome is single stranded.
[1565] 149. The AAV particle of any one of embodiments 135-148, wherein the viral genome further comprises a nucleotide sequence encoding a Rep protein, e.g., a non-structural protein, wherein the Rep protein comprises a Rep78 protein, a Rep68, Rep52 protein, and/or a Rep40 protein.
[1566] 150. The AAV particle of embodiment 149, wherein the Rep78 protein, the Rep68 protein, the Rep52 protein, and/or the Rep40 protein are encoded by at least one Rep gene.
[1567] 151. The AAV particle of any one of embodiments 135-150, wherein the viral genome further comprises a nucleic acid sequence encoding the AAV capsid variant of any one of embodiments 1-102 or 108.
[1568] 152. The AAV particle of any one of embodiments, 162-189, which is isolated, e.g., recombinant.
[1569] 153. A vector comprising a polynucleotide encoding the AAV capsid variant of any one of embodiments 1-102 or 108, the polynucleotide of any one of embodiments 103-106, 109-123, or a polynucleotide encoding the peptide of embodiment 107.
[1570] 154. A cell, e.g., a host cell, comprising the AAV capsid variant of any one of embodiments 1-102 or 108, the polynucleotide of any one of embodiments 103-106, 109-123, the peptide of embodiment 107, the AAV particle of any one of embodiments 124-152, or the vector of embodiment 153.
[1571] 155. The cell of embodiment 154, wherein the cell is a mammalian cell or an insect cell.
[1572] 156. The cell of embodiment 154 or 155, wherein the cell is a cell of a brain region or a spinal cord region, optionally a cell of the frontal cortex, sensory cortex, motor cortex, caudate, dentate nucleus, cerebellar cortex, cerebral cortex, brain stem, hippocampus, thalamus, putamen, cervical spinal cord region, thoracic spinal cord region, and/or lumbar spinal cord region.
[1573] 157. The cell of embodiment 154 or 155, wherein the cell is a neuron, a sensory neuron, a motor neuron, an astrocyte, or a muscle cell (e.g., a cell of the heart, diaphragm, or quadriceps).
[1574] 158. A method of making an AAV particle, comprising
[1575] (i) providing a host cell comprising a viral genome; and
[1576] (ii) incubating the host cell under conditions suitable to enclose the viral genome in the AAV capsid variant of any one of embodiments 1-102 or 108 or an AAV capsid variant encoded by the polynucleotide of any one of embodiments 103-106 or 109-123;
[1577] thereby making the AAV particle.
[1578] 159. The method of embodiment 158, further comprising, prior to step (i), introducing a first nucleic acid molecule comprising the viral genome into the host cell.
[1579] 160. The method of embodiment 158 or 159, wherein the host cell comprises a second nucleic acid encoding the capsid variant.
[1580] 161. The method of any one of embodiments 158-160, wherein the second nucleic acid molecule is introduced into the host cell prior to, concurrently with, or after the first nucleic acid molecule.
[1581] 162. A pharmaceutical composition comprising the AAV particle of any one of embodiments 124-152, an AAV particle comprising the capsid variant of any one of embodiments 1-102 or 108, or an AAV particle comprising the peptide of embodiment 107, and a pharmaceutically acceptable excipient.
[1582] 163. A method of delivering a payload to a cell or tissue (e.g., a CNS cell, a CNS tissue, a muscle cell, or a muscle tissue), comprising administering an effective amount of the pharmaceutical composition of embodiment 162, the AAV particle of any one of embodiments 124-152, an AAV particle comprising the capsid variant of any one of embodiments 1-102 or 108, or an AAV particle comprising the peptide of embodiment 107.
[1583] 164. The method of embodiment 163, wherein the cell is a cell of a brain region or a spinal cord region, optionally a cell of the frontal cortex, sensory cortex, motor cortex, caudate, dentate nucleus, cerebellar cortex, cerebral cortex, brain stem, hippocampus, thalamus, putamen, cervical spinal cord region, thoracic spinal cord region, and/or lumbar spinal cord region.
[1584] 165. The method of embodiment 163 or 164, wherein the cell is a neuron, a sensory neuron, a motor neuron, an astrocyte, or a muscle cell (e.g., a cell of the heart, diaphragm, or quadriceps).
[1585] 166. The method of any one of embodiments 163-165, wherein the cell or tissue is within a subject.
[1586] 167. The method of embodiment 166, wherein the subject has, has been diagnosed with having, or is at risk of having a neurological, e.g., a neurodegenerative disorder.
[1587] 168. The method of embodiment 166, wherein the subject has, has been diagnosed with having, or is at risk of having a muscular disorder or a neuromuscular disorder.
[1588] 169. The method of embodiment 166, wherein the subject has, has been diagnosed with having, or is at risk of having a neuro-oncological disorder.
[1589] 170. The method of embodiment 166, wherein the subject has, has been diagnosed with having, or is at risk of having a genetic disorder, e.g., a monogenic disorder or a polygenic disorder.
[1590] 171. The method of embodiment 166, wherein the subject has, has been diagnosed with having, or is at risk of having a cardiac disorder, e.g., a cardiac disorder as described herein (e.g., a cardiomyopathy (e.g., arrhythmogenic right ventricular cardiomyopathy, dilated cardiomyopathy, or hypertrophic cardiomyopathy), congestive heart failure, tachycardia (e.g., catecholaminergic polymorphic ventricular tachycardia), ischemic heart disease, and/or myocardial infarction).
[1591] 172. A method of treating a subject having or diagnosed with having a genetic disorder, e.g., a monogenic disorder or a polygenic disorder, comprising administering an effective amount of the pharmaceutical composition of embodiment 162, the AAV particle of any one of embodiments 124-152, an AAV particle comprising the capsid variant of any one of embodiments 1-102 or 108, or an AAV particle comprising the peptide of embodiment 107.
[1592] 173. A method of treating a subject having or diagnosed with having a neurological disorder, e.g., a neurodegenerative disorder, comprising administering an effective amount of the pharmaceutical composition of embodiment 162, the AAV particle of any one of embodiments 124-152, an AAV particle comprising the capsid variant of any one of embodiments 1-102 or 108, or an AAV particle comprising the peptide of embodiment 107.
[1593] 174. A method of treating a subject having or diagnosed with having a muscular disorder or a neuromuscular disorder, comprising administering an effective amount of the pharmaceutical composition of embodiment 162, the AAV particle of any one of embodiments 124-152, an AAV particle comprising the capsid variant of any one of embodiments 1-102 or 108, or an AAV particle comprising the peptide of embodiment 107.
[1594] 175. A method of treating a subject having or diagnosed with having a cardiac disorder, e.g., a cardiac disorder as described herein (e.g., a cardiomyopathy (e.g., arrhythmogenic right ventricular cardiomyopathy, dilated cardiomyopathy, or hypertrophic cardiomyopathy), congestive heart failure, tachycardia (e.g., catecholaminergic polymorphic ventricular tachycardia), ischemic heart disease, and/or myocardial infarction), comprising administering an effective amount of the pharmaceutical composition of embodiment 162, the AAV particle of any one of embodiments 124-152, an AAV particle comprising the capsid variant of any one of embodiments 1-102 or 108, or an AAV particle comprising the peptide of embodiment 107.
[1595] 176. A method of treating a subject having or diagnosed with having a neuro-oncological disorder, comprising administering an effective amount of the pharmaceutical composition of embodiment 162, the AAV particle of any one of embodiments 124-152, an AAV particle comprising the capsid variant of any one of embodiments 1-102 or 108, or an AAV particle comprising the peptide of embodiment 107.
[1596] 177. The method of any one of embodiments 172-176, where treating comprises prevention of progression of the disease or disorder in the subject.
[1597] 178. The method of embodiment 166-177, wherein the subject is a human.
[1598] 179. The method of any one of embodiments 166-178, wherein the AAV particle is administered to the subject intramuscularly, intravenously, intracerebrally, intrathecally, intracerebroventricularly, via intraparenchymal administration, or via intra-cisterna magna injection (ICM).
[1599] 180. The method of any one of embodiments 166-178, wherein the AAV particle is administered to the subject via focused ultrasound (FUS), e.g., coupled with the intravenous administration of microbubbles (FUS-MB), or MRI-guided FUS coupled with intravenous administration.
[1600] 181. The method of any one of embodiments 166-180, wherein the AAV particle is administered to the subject intravenously.
[1601] 182. The method of any one of embodiments 163-181, wherein administration of the AAV particle results in a decreased presence, level, and/or activity of a gene, mRNA, protein, or combination thereof.
[1602] 183. The method of any one of embodiments 163-181, wherein administration of the AAV particle results in an increased presence, level, and/or activity of a gene, mRNA, protein, or a combination thereof.
[1603] 184. The pharmaceutical composition of embodiment 162, the AAV particle of any one of embodiments 124-152, an AAV particle comprising the capsid variant of any one of embodiments 1-102 or 108, or an AAV particle comprising the peptide of embodiment 107, for use in a method of delivering a payload to a cell or tissue.
[1604] 185. The pharmaceutical composition of embodiment 162, the AAV particle of any one of embodiments 124-152, an AAV particle comprising the capsid variant of any one of embodiments 1-102 or 108, or an AAV particle comprising the peptide of embodiment 107, for use in a method of treating a genetic disorder, neurological disorder, neurodegenerative, disorder, muscular disorder, neuromuscular disorder, cardiac disorder, or neuro-oncological disorder.
[1605] 186. The pharmaceutical composition of embodiment 162, the AAV particle of any one of embodiments 124-152, an AAV particle comprising the capsid variant of any one of embodiments 1-102 or 108, or an AAV particle comprising the peptide of embodiment 107, for use in the manufacture of a medicament.
[1606] 187. Use of the pharmaceutical composition of embodiment 162, the AAV particle of any one of embodiments 124-152, an AAV particle comprising the capsid variant of any one of embodiments 1-102 or 108, or an AAV particle comprising the peptide of embodiment 107, in the manufacture of a medicament for treating a genetic disorder, a neurological disorder, a neurodegenerative disorder, a muscular disorder, a neuromuscular disorder, a cardiac disorder, or a neuro-oncological disorder.

### BRIEF DESCRIPTION OF THE DRAWINGS

[1607] FIG. 1A and FIG. 1B show brain transgene mRNA expression (RT-ddPCR) as fold over TBP (housekeeping gene).

[1608] FIG. 2A and FIG. 2B show brain viral DNA biodistribution (ddPCR) as vector genomes per cell.

[1609] FIG. 3A and FIG. 3B show brain transgene mRNA expression (RT-ddPCR) as fold over AAV9.

[1610] FIG. 4A and FIG. 4B show brain viral DNA biodistribution (ddPCR) as fold over AAV9.

[1611] FIG. 5A and FIG. 5B show spinal cord (FIG. 5A) and DRG (FIG. 5B) transgene mRNA expression as fold over TATA box binding protein.

[1612] FIG. 6A and FIG. 6B show spinal cord (FIG. 6A) and DRG (FIG. 6B) viral genome biodistribution as vector genomes per cell.

[1613] FIG. 7A and FIG. 7B show spinal cord (FIG. 7A) and DRG (FIG. 7B) mRNA expression as fold over AAV9.

[1614] FIG. 8A and FIG. 8B show spinal cord (FIG. 8A) and DRG (FIG. 8B) viral genome biodistribution as fold over AAV9.

[1615] FIG. 9A, FIG. 9B, FIG. 9C, FIG. 9D, and FIG. 9E show images of the brain transduction profile for TTD-001 and AAV9 as determined by immunohistochemical analyses of the dentate nucleus (FIG. 9A), cerebellar cortex (FIG. 9B), cortex (FIG. 9C), brain stem, hippocampus, thalamus and putamen (FIG. 9D) and dorsal root ganglion (FIG. 9E).

[1616] FIG. 10A and FIG. 10B show immunohistochemistry images of the DRG de-targeting characteristic of capsid variant TTD-004, compared to AAV9.

[1617] FIG. 11A and FIG. 11B show viral genome biodistribution in peripheral tissues quantified as vector genomes per cell.

[1618] FIG. 12A, FIG. 12B, and FIG. 12C show immunohistochemistry images of the heart of a female NHP at day 14 post-intravenous administration of AAV particles comprising a TTD-001 capsid variant, a TTD-004 capsid variant, or a wild-type AAV9 control capsid polypeptide. FIG. 12A provides a series of global images of the heart muscle, FIG. 12B provides a series of images of the left ventricle of the heart, and FIG. 12C provides a series of images of the right ventricle of the heart. For each series of images in FIGS. 12A-12C, the top left panel shows staining following administration of AAV particles comprising a TTD-001 capsid variant, the top right panel shows staining following administration of AAV particles comprising a TTD-004 capsid variant, and the bottom panel shows staining following administration of AAV particles comprising a wild-type AAV9 control capsid variant.

[1619] FIGS. 13A-13D show the viral titers by qPCR of TTD-001 with a SEAP/GFP payload after storage for the indicated durations at −80° C. (FIG. 13A), 2-8° C. (FIG. 13B), and room temperature (FIG. 13C), and after the indicated number of freeze thaw cycles (FIG. 13D). FIG. 13E shows collective viral titers by qPCR of TTD-001 with a SEAP/GFP payload for the indicated storage and freeze thaw conditions. FIGS. 13F and 13G show viral titers by qPCR of TTD-001 with a SEAP/GFP payload after storage at −80° C. and 2-8° C., respectively, for up to 90 days.

[1620] FIGS. 14A-14D show the % high molecular weight aggregates, as assessed by size exclusion chromatography (SEC), of TTD-001 with a SEAP/GFP payload after storage for the indicated durations at −80° C. (FIG. 14A), 2-8° C. (FIG. 14B), and room temperature (FIG. 14C), and after the indicated number of freeze thaw cycles (FIG. 14D). FIGS. 14E and 14F show the % high molecular weight aggregates, as assessed by SEC, of TTD-001 with a SEAP/GFP payload after storage at −80° C. and 2-8° C., respectively, for up to 90 days.

[1621] FIGS. 15A-15D show the % occupancy (e.g., % full capsids), as assessed by size exclusion chromatography-multiangle light scattering (SEC-MALS), of TTD-001 with a SEAP/GFP payload after storage for the indicated durations at −80° C. (FIG. 15A), 2-8° C. (FIG. 15B), and room temperature (FIG. 15C), and after the indicated number of freeze thaw cycles (FIG. 15D). FIGS. 15E and 15F show the % occupancy (e.g., % full capsids), as assessed by SEC-MALS, of TTD-001 with a SEAP/GFP payload after storage at −80° C. and 2-8° C., respectively, for up to 90 days.

[1622] FIG. 16A is a series of graph showing the quantification of the copies of viral genomes per diploid cell in various central nervous system and peripheral tissues of NHPs following intravenous administration of varying doses of AAV particles comprising the TTD-001 capsid variant. FIG. 16B is a series of graphs showing the quantification of transgene mRNA relative to the housekeeping gene in various central nervous system and peripheral tissues of NHPs following intravenous administration of varying doses of AAV particles comprising the TTD-001 capsid variant. FIG. 16C is a series of graphs showing the quantification of transgene mRNA relative to the endogenous gene (transgene mRNA as fold change relative to vehicle) in various central nervous system and peripheral tissues of NHPs following intravenous administration of varying doses of AAV particles comprising the TTD-001 capsid variant. FIG. 16D is a series of graphs showing the quantification of protein in the cervical DRG, heart, and liver of NHPs following intravenous administration of varying doses of AAV particles comprising the TTD-001 capsid variant.

[1623] FIG. 17A is a graph showing the percentage of transduced cells (% HA positive cells) in various brain regions of NHPs following intravenous administration of a dose of 6.7e12 VG/kg of AAV particles comprising the TTD-001 capsid variant. FIG. 17B is a graph showing the percentage of transduced cells (% HA positive cells) in various brain regions of NHPs following intravenous administration of a dose of 2e13 VG/kg of AAV particles comprising the TTD-001 capsid variant.

[1624] FIG. 17C is a graph showing the percentage of neuronal transduction (% HA cells among SMI311+ cells) in the thalamus, dentate nucleus, and spinal cord of the NHPs following intravenous administration of a dose of 2e13 VG/kg of AAV particles comprising the TTD-001 capsid variant.

### DETAILED DESCRIPTION OF THE DISCLOSURE

[1625] Described herein, inter alia, are compositions and formulations (e.g., optimized stable formulations) comprising an AAV capsid polypeptide, e.g., an AAV capsid variant, e.g., an AAV capsid variant described herein, and methods of making and using the same. Generally, the AAV capsid variant has enhanced tropism for a cell or tissue, e.g., for the delivery of a payload to said cell or tissue, for example a CNS tissue, a CNS cell, a muscle cell, or a muscle tissue.

[1626] In some embodiments, an AAV capsid variant disclosed herein comprises a modification in loop VIII of AAV9, e.g., at positions between 580-599, e.g., at positions 587, 588, 589, and/or 590, numbered relative to SEQ ID NO: 5, 8, 138 or 3636-3647. In some embodiments, loop (e.g., loop VIII) is used interchangeably herein with the term variable region (e.g., variable region VIII), or VR (e.g., VR-VIII). In some embodiments loop VIII comprises positions 580-599 (e.g., amino acids VATNHQSAQAQAQTGWVQNQ (SEQ ID NO: 1195)), numbered according to SEQ ID NO: 138. In some embodiments, loop VIII comprises positions 582-593 (e.g., amino acids TNHQSAQAQAQT (SEQ ID NO: 1196)), numbered according to SEQ ID NO: 138. In some embodiments loop VIII comprises positions 587-593 (e.g., amino acids AQAQAQT (SEQ ID NO: 1197)), numbered according to SEQ ID NO: 138. In some embodiments loop VIII comprises positions 587-590 (e.g., amino acids AQAQ (SEQ ID NO: 4737)), numbered according to SEQ ID NO: 138. In some embodiments, loop VIII or variable region VIII (VR-VIII) is as described in DiMattia et al. “Structural Insights into the Unique Properties of the Adeno-Associated Virus Serotype 9,” Journal of Virology, 12(86):6947-6958 (the contents of which are hereby incorporated by reference in their entirety), e.g., comprising positions 581-593 (e.g., ATNHQSAQAQAQT (SEQ ID NO: 1198)), numbered according to SEQ ID NO: 138.

[1627] As demonstrated in the Examples herein below, certain AAV capsid variants described herein show multiple advantages over wild-type AAV9, including (i) increased penetrance through the blood brain barrier following intravenous administration, (ii) wider distribution throughout the multiple brain regions, e.g., frontal cortex, sensory cortex, motor cortex, putamen, thalamus, cerebellar cortex, dentate nucleus, caudate, and/or hippocampus, and/or (iii) elevated payload expression in multiple brain regions. Without wishing to be being bound by theory, it is believed that these advantages may be due, in part, to the dissemination of the AAV capsid variants through the brain vasculature. In some embodiments, the AAV capsids described herein enhance the delivery of a payload to multiple regions of the brain including for example, the frontal cortex, sensory cortex, motor cortex, putamen, thalamus, cerebellar cortex, dentate nucleus, caudate, and/or hippocampus.

[1628] Several approaches have been used previously to produce AAV capsids with enhanced tropism for a cell or tissue, e.g., a CNS cell or tissue. One approach used co-infection of cultured cells (Grimm et al., 2008, the contents of which are herein incorporated by reference in its entirety) or in situ animal tissue (Lisowski et al., 2014, the contents of which are herein incorporated by reference in its entirety) with adenovirus, in order to trigger exponential replication of infectious AAV DNA. Another approach involved the use of cell-specific CRE transgenic mice (Deverman et al., 2016. the contents of which are herein incorporated by reference in its entirety) allowing viral DNA recombination specifically in astrocytes, followed by recovery of CRE-recombined capsid variants. Both approaches have had limited success.

[1629] The transgenic CRE system used by Deverman et al. (2016) has limited tractable in other animal species and AAV variants selected by directed evolution in mouse tissue do not show similar properties in large animals. Previously described transduction-specific approaches are not amenable to large animal studies because: 1) many tissues of interest (e.g. CNS) are not readily accessible to adenovirus co-infection, 2) the specific adenovirus tropism itself would bias the library distribution, and 3) large animals are typically not amenable to transgenesis or genetic engineering to express CRE recombinase in defined cell types.

[1630] To address these limitations, a broadly-applicable functional AAV capsid library screening platform for cell type-specific biopanning in non-transgenic animals has been developed and is described in the appended Examples. In the TRACER (Tropism Redirection of AAV by Cell type-specific Expression of RNA) platform system, the capsid gene is placed under the control of a cell type-specific promoter to drive capsid mRNA expression in the absence of helper virus co-infection. Without wishing to be bound by theory, it is believed that this RNA-driven screen increases the selective pressure in favor of capsid variants which transduce a specific cell type. The TRACER platform allows for generation of AAV capsid libraries whereby specific recovery and subcloning of capsid mRNA expressed in transduced cells is achieved with no need for transgenic animals or helper virus co-infection. Without wishing to be bound by theory, it is believed that since mRNA transcription is a hallmark of full transduction, the methods disclosed herein allow identification of fully infectious AAV capsid mutants, and in addition to its higher stringency, this method allows identification of capsids with high tropism for particular cell types using libraries designed to express CAP mRNA under the control of any cell-specific promoter such as, but not limited to, synapsin-1 promoter (neurons), GFAP promoter (astrocytes), TBG promoter (liver), CAMK promoter (skeletal muscle), MYH6 promoter (cardiomyocytes). Described herein are novel AAV capsid variants generated using the TRACER method which demonstrate enhance tropism in for example a CNS cell, a CNS tissue, a muscle cell, or a muscle tissue.

[1631] The AAV particles and payloads of the disclosure may be delivered to one or more target cells, tissues, organs, or organisms. In some embodiments, the AAV particles of the disclosure demonstrate enhanced tropism for a target cell type, tissue or organ. As a non-limiting example, the AAV particle may have enhanced tropism for cells and tissues of the central or peripheral nervous systems (CNS and PNS, respectively), or cells and tissues of a muscle. The AAV particles of the disclosure may, in addition, or alternatively, have decreased tropism for a cell-type, tissue or organ.

[1632] In some embodiments, an AAV comprises a small non-enveloped icosahedral capsid virus of the Parvoviridae family and is characterized by a single stranded DNA viral genome. Parvoviridae family viruses consist of two subfamilies: Parvovirinae, which infect vertebrates, and Densovirinae, which infect invertebrates. The Parvoviridae family comprises the Dependovirus genus which includes AAV, capable of replication in vertebrate hosts including, but not limited to, human, primate, bovine, canine, equine, and ovine species.

[1633] The parvoviruses and other members of the Parvoviridae family are generally described in Kenneth I. Berns, “Parvoviridae: The Viruses and Their Replication,” Chapter 69 in FIELDS VIROLOGY (3d Ed. 1996), the contents of which are incorporated by reference in their entirety.

[1634] In some embodiments, AAV are used as a biological tool due to a relatively simple structure, their ability to infect a wide range of cells (including quiescent and dividing cells) without integration into the host genome and without replicating, and their relatively benign immunogenic profile. The genome of the virus may be manipulated to contain a minimum of components for the assembly of a functional recombinant virus, or viral particle, which is loaded with or engineered to target a particular tissue and express or deliver a desired payload.

[1635] In some embodiments, the AAV, is a naturally occurring (e.g., wild-type) AAV or a recombinant AAV. In some embodiments, the wild-type AAV vector genome is a linear, single-stranded DNA (ssDNA) molecule approximately 5,000 nucleotides (nt) in length. In some embodiments, inverted terminal repeats (ITRs) cap the viral genome at both the 5′ and the 3′ end, providing origins of replication for the viral genome. In some embodiments, an AAV viral genome typically comprises two ITR sequences. These ITRs have a characteristic T-shaped hairpin structure defined by a self-complementary region (145 nt in wild-type AAV) at the 5′ and 3′ ends of the ssDNA which form an energetically stable double stranded region. The double stranded hairpin structures comprise multiple functions including, but not limited to, acting as an origin for DNA replication by functioning as primers for the endogenous DNA polymerase complex of the host viral replication cell.

[1636] In some embodiments, the wild-type AAV viral genome further comprises nucleotide sequences for two open reading frames, one for the four non-structural Rep proteins (Rep78, Rep68, Rep52, Rep40, encoded by Rep genes) and one for the three capsid, or structural, proteins (VP1, VP2, VP3, encoded by capsid genes or Cap genes). The Rep proteins are used for replication and packaging, while the capsid proteins are assembled to create the protein shell of the AAV, or AAV capsid polypeptide, e.g., an AAV capsid variant. Alternative splicing and alternate initiation codons and promoters result in the generation of four different Rep proteins from a single open reading frame and the generation of three capsid proteins from a single open reading frame. Though it varies by AAV serotype, as a non-limiting example, for AAV9/hu.14 (SEQ ID NO: 123 of U.S. Pat. No. 7,906,111, the contents of which are herein incorporated by reference in their entirety) VP1 refers to amino acids 1-736, VP2 refers to amino acids 138-736, and VP3 refers to amino acids 203-736. In some embodiments, for any one of the amino acid sequences of SEQ ID NOs: 5, 8, or 3636-3647, VP1 comprises amino acids 1-743, VP2 comprises amino acids 138-743, and VP3 comprises amino acids 203-743. In other words, VP1 is the full-length capsid sequence, while VP2 and VP3 are shorter components of the whole. As a result, changes in the sequence in the VP3 region, are also changes to VP1 and VP2, however, the percent difference as compared to the parent sequence will be greatest for VP3 since it is the shortest sequence of the three. Though described here in relation to the amino acid sequence, the nucleic acid sequence encoding these proteins can be similarly described. Together, the three capsid proteins assemble to create the AAV capsid protein. While not wishing to be bound by theory, the AAV capsid protein typically comprises a molar ratio of 1:1:10 of VP1:VP2:VP3.

[1637] AAV vectors of the present disclosure may be produced recombinantly and may be based on adeno-associated virus (AAV) parent or reference sequences. In addition to single stranded AAV viral genomes (e.g., ssAAVs), the present disclosure also provides for self-complementary AAV (scAAVs) viral genomes. scAAV vector genomes contain DNA strands which anneal together to form double stranded DNA. By skipping second strand synthesis, scAAVs allow for rapid expression in the transduced cell. In some embodiments, the AAV particle of the present disclosure is an scAAV. In some embodiments, the AAV particle of the present disclosure is an ssAAV.

[1638] Methods for producing and/or modifying AAV particles are disclosed in the art such as pseudotyped AAV vectors (PCT Patent Publication Nos. WO200028004; WO200123001; WO2004112727; WO2005005610; and WO2005072364, the content of each of which is incorporated herein by reference in its entirety).

[1639] As described herein, the AAV particles of the disclosure comprising an AAV capsid polypeptide, e.g., an AAV capsid variant, and a viral genome, have enhanced tropism for a cell-type or a tissue, e.g., a CNS cell-type, region, or tissue, or a muscle cell-type or tissue.

### Peptides

[1640] Disclosed herein are peptides, and associated AAV particles comprising an AAV capsid polypeptide, e.g., an AAV capsid variant, with a peptide, for enhanced or improved transduction of a target tissue (e.g., cells of the CNS or PNS). In some, embodiments, the peptide, is an isolated, e.g., recombinant, peptide. In some embodiments, the nucleic acid encoding the peptide is an isolated, e.g., recombinant nucleic acid.

[1641] In some embodiments, the peptide may increase distribution to an AAV particle to a cell, region, or tissue of the CNS. The cell of the CNS may be, but is not limited to, neurons (e.g., excitatory, inhibitory, motor, sensory, autonomic, sympathetic, parasympathetic, Purkinje, Betz, etc.), glial cells (e.g., microglia, astrocytes, oligodendrocytes) and/or supporting cells of the brain such as immune cells (e.g., T cells). The tissue of the CNS may be, but is not limited to, the cortex (e.g., frontal, parietal, occipital, temporal), thalamus, hypothalamus, striatum, putamen, caudate nucleus, hippocampus, entorhinal cortex, basal ganglia, or deep cerebellar nuclei.

[1642] In some embodiments, the peptide may increase distribution of an AAV particle to a cell, region, or tissue of the PNS. The cell or tissue of the PNS may be, but is not limited to, a dorsal root ganglion (DRG).

[1643] In some embodiments, the peptide may increase distribution of an AAV particle to the CNS (e.g., the cortex) after intravenous administration. In some embodiments, the peptide may increase distribution of an AAV particle to the CNS (e.g., the cortex) following focused ultrasound (FUS), e.g., coupled with the intravenous administration of microbubbles (FUS-MB), or MRI-guided FUS coupled with intravenous administration.

[1644] In some embodiments, the peptide may increase distribution of an AAV particle to the PNS (e.g., DRG) after intravenous administration. In some embodiments, the peptide may direct an AAV particle to the PNS (e.g., DRG) following focused ultrasound (FUS), e.g., coupled with the intravenous administration of microbubbles (FUS-MB), or MRI-guided FUS coupled with intravenous administration.

[1645] In some embodiments, the peptide may increase the distribution of an AAV particle to a cell, region, or tissue of a muscle. In some embodiments, the muscle is a heart muscle. In some embodiments, the peptide may increase distribution of an AAV particle to a muscle cell, region, or tissue after intravenous administration.

[1646] A peptide may vary in length. In some embodiments, the peptide is about 3 to about 20 amino acids in length. As non-limiting examples the peptide may be 3, 4, 5, 6, 7, 8, 9, 10, 11, 12, 13, 14, 15, 16, 17, 18, 19, 20 or 3-5, 3-8, 3-10, 3-12, 3-15, 3-18, 3-20, 5-10, 5-15, 5-20, 10-12, 10-15, 10-20, 12-20, or 15-20 amino acids in length. In some embodiments, a peptide comprises about 6 to 12 amino acids in length, e.g., about 9 amino acids in length. In some embodiments, a peptide comprises about 5 to 10 amino acids in length, e.g., about 7 amino acids in length. In some embodiments, a peptide comprises about 15 to 20 amino acids in length, e.g., about 19 amino acids in length.

[1647] In some embodiments a peptide may comprise a sequence as set forth in Table 1A. In some embodiments a peptide may comprise a sequence as set forth in Table 1B. In some embodiments a peptide may comprise a sequence as set forth in Table 2. In some embodiments a peptide may comprise a sequence as set forth in Table 7. In some embodiments a peptide may comprise a sequence as set forth in Table 10. In some embodiments a peptide may comprise a sequence as set forth in Table 11. In some embodiments a peptide may comprise a sequence as set forth in Table 20. In some embodiments, the peptide comprises an amino acid sequence of any one of peptide 1, 2, 3, 4, 5, 6, 7, 8, 9, 10, 11, or 12, e.g., as described in Table 2. In some embodiments, the peptide is isolated, e.g., recombinant.

TABLE 1A
Exemplary Peptide Sequences

| | SEQ | | SEQ | | SEQ | | SEQ |
|---|---|---|---|---|---|---|---|
| | ID | | ID | Peptide | ID | Peptide | ID |
| Peptide Sequence | NO: | Peptide Sequence | NO: | Sequence | NO: | Sequence | NO: |
| QLNGAVHLYAQ | 139 | PLNGAVHLYA | 224 | PLNGAVHLYA | 309 | PLNGAVHLYA | 394 |
| AQLSPVQN | | QAQTLQVQN | | QAQTGWVRN | | QAQTGSVQI | |
| PLDGAVHLYAQ | 140 | PLNGAVHLYA | 225 | PLNGAVHLYA | 310 | PLNGTVHLYA | 395 |
| PQTGWVQN | | QAQTMSVQN | | QAQLAAVQN | | QAQTGGVQN | |
| QLNGAVHLYAQ | 141 | QLNGAVHLYA | 226 | PLNGAVHLYA | 311 | PLNGAVHLYA | 396 |
| AQTMSVQN | | QAQLQPVQN | | QAQTSPDQN | | KAQVSPVQN | |
| PLDSSVHLYAQ | 142 | PLNGAVHLYA | 227 | PLNGAVHLYA | 312 | PLNGAVHLYA | 397 |
| AQTGWVQN | | QAQVAKVQN | | QAQRSGVQN | | QAQRGGVQN | |
| PLNGAVHLYAQ | 143 | PLNGAVHLYA | 228 | PLNGAVHLYA | 313 | PLNGGVHLYA | 398 |
| AQTTKVQN | | QAQRAAVQN | | QAQTGGVQT | | QAQTGLVQN | |
| PLDGAVHLYAQ | 144 | PLNGAVHLYA | 229 | PLNGAVHLYA | 314 | PLNGAVHLYA | 399 |
| AQTGSVQN | | QAQTVGVQN | | QAQTGWVPN | | QAQVMSVQN | |
| ALNGAVHLYAQ | 145 | PLNGAVHLYA | 230 | PLDSAVHLYA | 315 | PLNGAVHLYA | 400 |
| AQTTSVQN | | QAQLNPVQN | | QAQTGWVQN | | QAQTTGVQN | |
| PLNGSVHLYAQ | 146 | PLNGAVHLYA | 231 | PLNGAVHLYA | 316 | PLNGAVHLYA | 401 |
| AQTMSVQN | | QAQLSQVQN | | QAQTTPVQT | | QAQLSPVQK | |
| QLNGAVHLYAQ | 147 | PLNGTVHLYAQ | 232 | PLNGAVHLYA | 317 | SLNGAVHLYA | 402 |
| AQTSPVQN | | AQTGSVQN | | QAQLMAVQN | | QAQTAAVQN | |
| PLNGAVHLYAQ | 148 | PLNGAVHLYA | 233 | PLNGAVHLYA | 318 | PINGAVHLYA | 403 |
| AQTMKVQN | | QAQTKPVQN | | QAQTMPVQN | | QAQTSPVQN | |
| PLNGAVHLYAQ | 149 | PLNGAVHLYA | 234 | PLNGAVHHYA | 319 | PLNGAVHLYA | 404 |
| AQVAQVQN | | QAQTNAVQN | | QAQTSPVQN | | QAQLSRVQN | |
| PLDGAVHLYAQ | 150 | ALDGAVHLYA | 235 | PLNGAVHLYA | 320 | PLNGAVHLYA | 405 |
| AQTGGVQN | | QAQTGWVQN | | QAQLANVQN | | QAQVSSVQK | |
| PLNGAVHLYAQ | 151 | PLNGAVHLYA | 236 | PLNGAVHLYA | 321 | PLNGAVHLYA | 406 |
| AQTAWDQN | | QAQLATVQN | | QAQVSTVQN | | QAQTAPVQT | |
| PLNGSVHLYAQ | 152 | PLNGAVHLYA | 237 | PLNGAVHLYA | 322 | PLNGAVHLYA | 407 |
| AQTGWDQN | | QAQVTPVQN | | QAQSAQVQN | | QAQMAPVQN | |
| PLNGAVHLYAQ | 153 | PLNGAVHLYA | 238 | PLNGAVHLYA | 323 | PLNGAVHLYA | 408 |
| AQTGSVQH | | QAQVQAVQN | | QAQNTPVQN | | QAQILGVQN | |
| PLNGAVHLYAQ | 154 | PLNGAVHLYA | 239 | PLNGAVHLYA | 324 | PLNGAVHLYA | 409 |
| AQVKQVQN | | QAQTTSVQN | | QAQVSSVQT | | QAQTASVQT | |
| PLNGAVHLYAQ | 155 | PLNGAVHLYA | 240 | PLNGAVHLYA | 325 | PLNGAVHLYA | 410 |
| AQSAPVQN | | QAQCTPVQN | | QAQTVSVKN | | QAQTGSLQN | |
| PLNGAVHLYAQ | 156 | ALNGAVHLYA | 241 | PLNGAVHLYA | 326 | PLNGAVHLYA | 411 |
| AQLSKVQN | | QAQTGRVQN | | QPQTGLVQN | | QAQTGTVQN | |
| PLNGAVHLYAQ | 157 | PLNGSVHLYAQ | 242 | PLNGAVHLYA | 327 | PLNGGVHLYA | 412 |
| AQLAPVQN | | AQTGWVQD | | QAQTGSVQN | | QAQTGWVQN | |
| PLNGAVHLYAQ | 158 | PLNGAVHLYA | 243 | SLNGAVHLYA | 328 | PLNGAVHLYA | 413 |
| AQLAQVQN | | QAQTAGVQN | | QAQTLPVQN | | QAQTGSVQT | |
| QLNGAVHLYAQ | 159 | PLNGAVHLYA | 244 | PLNGAVHLYA | 329 | PLNGAVHLYA | 414 |
| AQVASVQN | | QAQTSQVQN | | QAQTGGAQN | | QAQTSSVQT | |
| PLNGAVHLYAQ | 160 | PLNGAVHLYA | 245 | SLNGAVHLYA | 330 | PLNGAVHLYA | 415 |
| AQTAKVQN | | QAQTMNVQN | | QAQTAQVQN | | QAQTSHVQN | |
| PLNGAVHLYAQ | 161 | PLNGAVHLYA | 246 | PLNGAVHLYA | 331 | PLNGGVHLYA | 416 |
| AQSAKVQN | | QAQTSTVQN | | QAQTAVVQN | | QAQTGWDQN | |
| PLNGAVHLYAQ | 162 | PLNGAVHLYA | 247 | PLNGAVHLYA | 332 | PLNGAVHLYA | 417 |
| AQTGCFQN | | QAQVKPVQN | | QAQRLGVQN | | QAQRIGVQN | |
| PLNGAVHLYAQ | 163 | PLNGAVHLYA | 248 | PLNGSVHLYA | 333 | TLNGAVHLYA | 418 |
| AQTQKVQN | | QAQASPVQN | | QAQTGWVQH | | QAQTTSVQN | |
| PLNGSVHLYAQ | 164 | PLNGAVHLYA | 249 | PLNGAVHLYA | 334 | PLNGAVHLYA | 419 |
| AQTTSVQN | | QAQVAAVQN | | QAQRTLVQN | | QAQTGWGQT | |
| PLNGGVHLYAQ | 165 | PLNGAVHLYA | 250 | SLNGAVHLYA | 335 | PLNGAVHLYA | 420 |
| AQTGRVQN | | QAQLKSVQN | | QAQTMAVQN | | QAQSAMVQN | |
| PLNGAVHLYAQ | 166 | PLNGAVHLYA | 251 | PLNGAVHLYA | 336 | PLNGAVHLYA | 421 |
| AQTVAVQN | | QAQIAAVQN | | QAQTQMVQN | | QAQTSMVQN | |
| ALNGAVHLYAQ | 167 | PLNGAVHLYA | 252 | PLNGAVHLYA | 337 | PLNGAVHLYA | 422 |
| AQSSPVQN | | QAQTAAVQN | | QAQITPVQN | | QAQSMGVQN | |
| PLNGAVHLYAQ | 168 | PLNGAVHLYA | 253 | PLNGAVHLYA | 338 | PLNGAVHLYA | 423 |
| AQLSPVQN | | QAQTKAVQN | | QAQTVWVQK | | QAQSMSVQN | |
| QLNGAVHLYAQ | 169 | PLNGAVHLYA | 254 | PLNGAVHLYA | 339 | PLNGAVHLYA | 424 |
| AQTTSVQN | | QAQTGSVQS | | QAQRSAVQN | | QAQTSSVQN | |
| PLNGAVHLYAQ | 170 | PLNGAVHLYA | 255 | PLNGAVHLYA | 340 | PLNGAVHLYA | 425 |
| AQTTQVQN | | QAQVSNVQN | | QAQTASVQN | | QAQTSGVQN | |
| PLNGAVHLYAQ | 171 | PLNGAVHLYA | 256 | PLNGAVHLYA | 341 | PLNGAVHLYA | 426 |
| AQTAQVQN | | QAQTAPVQN | | QAQTMGVQN | | QAQTGAVQN | |
| QLNGAVHLYAQ | 172 | PLNGAVHLYA | 257 | PLNGAVHLYA | 342 | PLNGAVHLYA | 427 |
| AQTVAVQN | | QAQLMPVQN | | QAQTGGVQH | | QAQVNSVQN | |
| PLNGAVHLYAQ | 173 | PLNGAVHLYA | 258 | PLNGAVHLYA | 343 | PLNGAVHLYA | 428 |
| AQRIAVQN | | QAQLHPVQN | | QAQVQSVQN | | QAQVAGVQN | |
| PLNGAVHLYAQ | 174 | PLNGAVHLYA | 259 | PLNGAVHLYA | 344 | PLNGAVHLYA | 429 |
| AQRASVQN | | QAQRAQVQN | | QAQTGGVQN | | QAQIGSVQN | |
| PLNGAVHLYAQ | 175 | PLNGAVHLYA | 260 | SLNGAVHLYA | 345 | PLDGAVHVYA | 430 |
| AQTTPVQN | | QAQLTNVQN | | QAQTAPVQN | | QAQTGWVQN | |
| QLNGAVHLYAQ | 176 | PLNGAVHLYA | 261 | PLNGAVHLYA | 346 | TLNGAVHLYA | 431 |
| AQLASVQN | | QAQRTTVQN | | QAQISPVQN | | QAQTTPVQN | |
| PLNGAVHLYAQ | 177 | PLNGAVHLYA | 262 | PLNGAVHLYA | 347 | PLNGAVHLYA | 432 |
| AQLTPVQN | | QAQTSVVQN | | QPQTGWVKN | | QAQLGSVQN | |
| PLNGAVHLYAQ | 178 | SLNGAVHLYA | 263 | PLNGAVHLYA | 348 | PLNGAVHLYA | 433 |
| AQSTPVQN | | QAQTMSVQN | | QAQTGSAQN | | QAQVNGVQN | |
| PLNGAVHLYAQ | 179 | ALNGAVHLYA | 264 | PLNGAVHLYA | 349 | QLNGAVHLYA | 434 |
| AQTSPVQN | | QAQTLAVQN | | QAQTGWAQN | | QAQLSSVQN | |
| QLNGAVHLYAQ | 180 | PLNGAVHLYA | 265 | PLNGAVHLYA | 350 | PLNGAVHLYA | 435 |
| AQVSQVQN | | QAQRMSVQN | | QAQTMSVQT | | QAQLTAVQN | |
| PLNGAVHLYAQ | 181 | ALNGAVHLYA | 266 | PLNGSVHLYA | 351 | PLNGAVHLYA | 436 |
| AQTMQVQN | | QAQLTPVQN | | QAQTAWVQN | | QAQVQNVQN | |
| PLNGAVHLYAQ | 182 | PLNGAVHLYA | 267 | PLNGAVHLYA | 352 | PLNGAVHLYA | 437 |
| AQTSKVQN | | QAQVGNVQN | | QAQVGGVQN | | QAQTKSVQN | |
| SLNGAVHLYAQ | 183 | PLNGAVHLYA | 268 | PLNGAVHLYA | 353 | PLNGAVHLYA | 438 |
| AQVSPVQN | | QAQLMQVQN | | KAQTSPVQN | | QAQSVGVQN | |
| PLNGAVHLYAQ | 184 | PLNGSVHLYAQ | 269 | PLNGAVHLYA | 354 | QLNGAVHLYA | 439 |
| AQVSQVQN | | AQTAQVQN | | QAQLAPVQT | | QAQLGPVQN | |
| PLNGAVHLYAQ | 185 | PLNGAVHLYA | 270 | PLDGAVHLYA | 355 | PLNGAVHLYA | 440 |
| AQVSPVQN | | QAQTATVQN | | QAQTALVQN | | QAQTAWVQT | |
| PLNGAVHLYAQ | 186 | PLNGAVHLYA | 271 | PLNGAVHLYA | 356 | PLNGAVHLYA | 441 |
| AQTVQVQN | | QAQVHPVQN | | QAQTALVQN | | QAQNASVQN | |
| PLNGAVHLYAQ | 187 | PLNGAVHLYA | 272 | PLNGAVHLYA | 357 | PLNGAVHLYA | 442 |
| AQVTAVQN | | QAQVSPVQT | | QAQLAGVQN | | QAQTSAVQN | |
| PLNGAVHLYAQ | 188 | PLNGAVHLYA | 273 | PLNGAVHLYA | 358 | ALNGAVHLYA | 443 |
| AQRQPVQN | | QAQISSVQN | | QAQRTAVQN | | QAQLAAVQN | |
| PLNGNVHLYAQ | 189 | PLNGAVHLYA | 274 | PLNGAVHLYA | 359 | PLNGAVHLYD | 444 |
| AQTGGVQN | | QAQVASVQN | | QAQRSPVQN | | QAQVSPVQN | |
| PLDGAVHLYAQ | 190 | PLNGAVHLYA | 275 | PLNGAVHLYA | 360 | PLNGAVHLYA | 445 |
| AQTAWVQN | | QAQTRWDQN | | QAQTLAVQN | | QAQTMSVKN | |
| PLNGAVHLYAQ | 191 | PLNGAVHLYA | 276 | PLNGAVHLYA | 361 | PLNGAVHLYA | 446 |
| AQISGVQN | | QAQTMTVQN | | QAQLAHVQN | | QAQTANVQN | |
| PLNGAVHLYAQ | 192 | PLNGAVHLYA | 277 | PLNGAVHLYA | 362 | PLNGAVHLYA | 447 |
| AQVRPVQN | | QAQRSSVQN | | QAQTSLVQN | | QAQTGWFQN | |
| PLNGAVHLYAQ | 193 | PLNGGVHLYA | 278 | PLNGAVHLYA | 363 | PLNGNVHLYA | 448 |
| AQLGPVQN | | QAQTGWVRN | | QAQRLSVQN | | QAQTGWVQN | |
| PLNGAVHLYAQ | 194 | PLNGAVHLYA | 279 | PLNGAVHLYD | 364 | PLNGSVHLYA | 449 |
| AQTNQVQN | | QAQTAWVQN | | QAQLSPVQN | | QAQTGWVQS | |
| PLNGAVHLYAQ | 195 | PLNGSVHLYAQ | 280 | PLNGAVHLYA | 365 | PLNGAVHLYA | 450 |
| AQVQQVQN | | AQPGWVQN | | QAQLMGVQN | | QAQTGGVLN | |
| PLNGAVHLYAQ | 196 | ALNGAVHLYA | 281 | PLNGSVHLYA | 366 | PLNGAVHLYA | 451 |
| AQVANVQN | | QAQTGWAQN | | QAQTGWVQT | | QAQLTSVQN | |
| PLNGAVHLYAQ | 197 | PLNGAVHLYA | 282 | PLNGAVHLYA | 367 | PLNGAVHLYA | 452 |
| AQAAPVQN | | QAQRTGVQN | | QAQSMQVQN | | QAQTGWVQT | |
| QLNGAVHLYAQ | 198 | ALNGAVHLYA | 283 | PLNGGVHLYA | 368 | PLNGAVHLYA | 453 |
| AQVAQVQN | | QAQTGWVQS | | QAQTGWFQN | | QAQRSQVQN | |
| PLNGAVHLYAQ | 199 | PLNGAVHLYA | 284 | PLNGAVHLYA | 369 | PLNGAVHIYA | 454 |
| AQRSTVQN | | QAQVATVQN | | QAQTQTVQN | | QAQVSPVQN | |
| PLNGAVHLYAQ | 200 | PLNGAVHLYA | 285 | PLDGAVHLYS | 370 | PLNGSVHLYA | 455 |
| AQTMAVQN | | QAQVTSVQN | | QAQTGWVQN | | QAQTGWFQN | |
| PLNGAVHLYAQ | 201 | PLNGAVHLYA | 286 | PLNGAVHLYA | 371 | PLNGAVHLYA | 456 |
| AQIQPVQN | | QAQVSSVQN | | QAQTGWEQN | | QAQRIPVQN | |
| PLNGAVHLYAQ | 202 | PLNGSVHLYAQ | 287 | PLNGAVHLYA | 372 | QLNGAVHLYA | 457 |
| AQIASVQN | | AQTSSVQN | | QAQVGSVQN | | QAQLVPVQN | |
| PLNGAVHLYAQ | 203 | PLNGAVHLYA | 288 | PLNGAVHLYA | 373 | PLNGAVHLYA | 458 |
| AQTVSVQN | | QAQTNSVQN | | QAQVSGVQN | | QAQTGWVQD | |
| PLNGAVHLYAQ | 204 | PLNGAVHLYA | 289 | PLNGAVHLYA | 374 | PLNGAVHLYA | 459 |
| AQRGSVQN | | QAQVKAVQN | | QAQVMAVQN | | KAQVSSVQN | |
| PLNGAVHLYAQ | 205 | PLNGAVHLYA | 290 | PLNGAVHLYA | 375 | PLNGAVHLYA | 460 |
| AQNSPVQN | | QAQSGPVQN | | QAQIGGVQN | | QAQRVEVQN | |
| PLNGAVHLYAQ | 206 | PLNGAVHLYA | 291 | PLNGAVHLYA | 376 | PLNGAVHLYA | 461 |
| AQLQPVQN | | QAQTGPVQN | | QAQIAGVQN | | QAQVLPVQN | |
| PLNGAVHLYAQ | 207 | PLNGAVHLYA | 292 | PLNGAVHLYA | 377 | PLNGSVHLYA | 462 |
| AQVTGVQN | | QAQTAMVQN | | KAQTVSVQN | | QAQTGWVRN | |
| PLNGAVHLYAQ | 208 | PLNGAVHLYA | 293 | PLNGAVHLYS | 378 | PLNGTVHLYA | 463 |
| AQVMQVQN | | QAQTQPVQN | | QAQTGRVQN | | QAQSSPVQN | |
| PLNGAVHLYAQ | 209 | PLNGSVHLYAQ | 294 | PLNGAVHLYA | 379 | PLNGAVHLYA | 464 |
| AQSMAVQN | | AQTGSVQN | | QAQLSHVQN | | QAQTGGVQK | |
| PLNGAVHLYAQ | 210 | PLNGAVHLYA | 295 | PLNGAVHLYA | 380 | PLNGAVHLYA | 465 |
| AQVGKVQN | | QAQTQQVQN | | QAQVQTVQN | | QAQSVAVQN | |
| ALNGAVHLYAQ | 211 | PLNGAVHLYA | 296 | SLDGAVHLYA | 381 | QLNGAVHLYA | 466 |
| AQSAPVQN | | QAQVSRVQN | | QAQTGWVQN | | QAQLSGVQN | |
| PLNGAVHLYAQ | 212 | QLNGAVHLYA | 297 | PLNGAVHLYA | 382 | PLNGAVHLYA | 467 |
| AQIQSVQN | | QAQVLPVQN | | QPQTGWDQN | | QAQLQQVQN | |
| PLNGAVHLYAQ | 213 | PLNGAVHLYA | 298 | PLNGAVHLYA | 383 | PLNGAVHLYA | 468 |
| AQCSPVQN | | QAQTGWVQP | | QAQRNSVQN | | QAQLSTVQN | |
| PLNGAVHLYAQ | 214 | QLNGAVHLYA | 299 | PLNGAVHLYA | 384 | PLNGAVHLYA | 469 |
| AQLQRVQN | | QAQLGSVQN | | QAQTLPVQN | | QAQSAAVQN | |
| PLNGAVHLYAQ | 215 | PLNGAVHLYA | 300 | PLNGAVHLYA | 385 | SLNGAVHLYA | 470 |
| AQTAWVQH | | QAQVSAVQN | | QAQTKQVQN | | QAQVSAVQN | |
| PLDGAVHLYAQ | 216 | PLNGAVHLYA | 301 | PLNGSVHLYA | 386 | PLNGAVHLYA | 471 |
| AQTGWDQN | | QAQVLSVQN | | QAQTGWVQN | | QAQRTSVQN | |
| PLNGAVHLYAQ | 217 | PLNGAVHLYA | 302 | PLNGAVHLYA | 387 | PLNGAVHLYA | 472 |
| AQTPPVQN | | QAQTQHVQN | | QAQLGQVQN | | QAQTQNVQN | |
| PLNGAVHLYAQ | 218 | PLNGAVHLYA | 303 | SLNGAVHLYA | 388 | PLNGAVHLYA | 473 |
| AQVTKVQN | | QAQLASVQN | | QAQTGRVQN | | QAQVNAVQN | |
| PLNGAVHLYAQ | 219 | PLNGAVHLYA | 304 | PLDGAVHLYA | 389 | PLNGAVHLYA | 474 |
| AQSSPVQN | | QAQQAPVQN | | QAQTGWVQN | | QAQTVAVQT | |
| PLNGAVHLYAQ | 220 | PLNGAVHLYA | 305 | PLNGSVHLYA | 390 | PLNGAVHLYA | 475 |
| AQAGPVQN | | QAQNAQVQN | | QAQTGWAQN | | QAQLMSVQN | |
| PLNGAVHLYAQ | 221 | PLNGAVHLYA | 306 | TLNGAVHLYA | 391 | PLNGAVHLYA | 476 |
| AQLARVQN | | QAQATPVQN | | QAQVASVQN | | QAQTGWVQN | |
| PLNGAVHLYAQ | 222 | PLNGAVHLYA | 307 | PLNGAVHLYA | 392 | PLNGAVHLYA | 566 |
| AQTTTVQN | | QAQVQPVQN | | QAQNMQVQN | | QAQLSPVKN | |
| PLNGAVHLYAQ | 223 | PLNGAVHLYA | 308 | PLNGAVHLYA | 393 | | |
| AQTGGFQN | | QAQTTAVQN | | QAQNVQVQN | | | |

TABLE 1B
Exemplary Peptide Sequences

| | SEQ | | SEQ | | SEQ | | SEQ |
|---|---|---|---|---|---|---|---|
| Peptide | ID | Peptide | ID | Peptide | ID | Peptide | ID |
| Sequence | NO: | Sequence | NO: | Sequence | NO: | Sequence | NO: |
| PLNGAVHLYAQA | 476 | PLNGAVHLYAQA | 423 | PLNGAVHLYAQ | 369 | PLNGAVHLYAQ | 478 |
| QTGWVQN | | QSMSVQN | | AQTQTVQN | | AQTGWVQH | |
| SLNGAVHLYAQA | 1036 | PLNGAVHLYAQA | 646 | PLNGAVHLYAQ | 427 | PLNGAVHLYAQ | 797 |
| QTGWVQN | | QSQLVQN | | AQVNSVQN | | AQTGWGQN | |
| QLNGAVHLYAQA | 680 | PLNGAVHLYAQA | 429 | PLNGAVHLYAQ | 339 | PLNGAVHLYAQ | 768 |
| QTGWVQN | | QIGSVQN | | AQRSAVQN | | AQTGWVQI | |
| ALNGAVHLYAQA | 577 | PLNGAVHLYAQA | 488 | PLNGAVHLYAQ | 365 | PLNGAVHLYAQ | 379 |
| QTGWVQN | | QRSVVQN | | AQLMGVQN | | AQLSHVQN | |
| PLNGSVHLYAQA | 386 | PLNGAVHLYAQA | 252 | PLNGAVHLYAQ | 509 | PLNGAVHLYAQ | 545 |
| QTGWVQN | | QTAAVQN | | AQRQSVQN | | AQSAFVQN | |
| PVNGAVHLYAQA | 1019 | PLNGAVHLYAQA | 178 | PLNGAVHLYAQ | 711 | PLNGAVHLYAQ | 228 |
| QTGWVQN | | QSTPVQN | | AQLVGVQN | | AQRAAVQN | |
| PLNGAVHLYAQA | 911 | PLNGAVHLYAQA | 231 | PLNGAVHLYAQ | 187 | PLNGAVHLYAQ | 201 |
| QTGLVQN | | QLSQVQN | | AQVTAVQN | | AQIQPVQN | |
| PLNGAVHLYAQA | 327 | PLNGGVHLYAQA | 398 | PLNGAVHLYAQ | 261 | PLDGAVHLYAQ | 190 |
| QTGSVQN | | QTGLVQN | | AQRTTVQN | | AQTAWVQN | |
| PLNGAVHLYSQA | 924 | PLNGAVHLYAQA | 171 | PLNGAVHLYAQ | 422 | PLNGAVHLYAQ | 408 |
| QTGWVQN | | QTAQVQN | | AQSMGVQN | | AQILGVQN | |
| PLNGGVHLYAQA | 412 | PLNGAVHLYAQA | 291 | PLNGAVHLYAQ | 374 | PLNGAVHLYAQ | 433 |
| QTGWVQN | | QTGPVQN | | AQVMAVQN | | AQVNGVQN | |
| PLNGTVHLYAQA | 557 | PLNGAVHLYSQA | 573 | PLNGAVHLYAQ | 233 | PLNGAVHLYAQ | 547 |
| QTGWVQN | | QTGLVQN | | AQTKPVQN | | AQSVQVQN | |
| PLNGAVHLYAQA | 344 | ALNGAVHLYAQA | 766 | PLNGAVHLYAQ | 322 | PLNGAVHLYAQ | 755 |
| QTGGVQN | | QTGGVQN | | AQSAQVQN | | AQTGWVHN | |
| PLDGAVHLYAQA | 389 | PLNGAVHLYAQA | 248 | PLNGAVHLYAQ | 205 | PLNGAVHLYAQ | 156 |
| QTGWVQN | | QASPVQN | | AQNSPVQN | | AQLSKVQN | |
| PLNGAVHLYAQA | 279 | PLNGAVHLYAQA | 373 | PLNGAVHLYAQ | 306 | PLNGAVHLYAQ | 675 |
| QTAWVQN | | QVSGVQN | | AQATPVQN | | AQTNGVQN | |
| PLNGAVHLYAQP | 505 | PLNGTVHLYAQA | 970 | PLNGQVHLYAQ | 718 | PLNGAVHLYAQ | 552 |
| QTGWVQN | | QTGLVQN | | AQTGWVQN | | AQRTQVQN | |
| PLNGAVHLYAQA | 528 | PLNGAVHLYAQA | 155 | PLNGAVHLYAQ | 428 | PLNGAVHLYAQ | 245 |
| QTGRVQN | | QSAPVQN | | AQVAGVQN | | AQTMNVQN | |
| PLNGAVHLYAQA | 340 | PLNGAVHLYAQA | 224 | PLNGAVHLYAQ | 204 | PLNGAVHLYAQ | 397 |
| QTASVQN | | QTLQVQN | | AQRGSVQN | | AQRGGVQN | |
| QLNGSVHLYAQA | 622 | PLNGAVHLYAQA | 206 | PLNGAVHLYAQ | 247 | PLNGAVHLYAQ | 570 |
| QTGWVQN | | QLQPVQN | | AQVKPVQN | | AQTTRVQN | |
| PLNGAVHLYAQA | 605 | PLNGAVHLYAQA | 270 | PLNGSVHLYAQ | 351 | PLNGAVHLYAQ | 192 |
| QLSSVQN | | QTATVQN | | AQTAWVQN | | AQVRPVQN | |
| PLNGAVHLYAQA | 424 | PLNGAVHLYAQA | 666 | PLNGAVHLYAQ | 265 | PLNGAVHLYAQ | 289 |
| QTSSVQN | | QTGQVQN | | AQRMSVQN | | AQVKAVQN | |
| SLNGAVHLYAQA | 707 | PLNGAVHLYAQA | 596 | PLNGAVHLYAQ | 594 | PLNGAVHLYAQ | 221 |
| QTGLVQN | | QATSVQN | | AQNLPVQN | | AQLARVQN | |
| PLNGAVHLYAQA | 821 | PLNGTVHLYAQA | 232 | PLNGAVHLYAQ | 619 | PLNGAVHLYAQ | 523 |
| QSSLVQN | | QTGSVQN | | AQNALVQN | | AQNQPVQN | |
| PLNGAVHLYAQA | 1077 | PLNGAVHLYAQA | 375 | PLNGAVHLYAQ | 492 | PLNGAVHLYAQ | 148 |
| QSSSVQN | | QIGGVQN | | AQRTPVQN | | AQTMKVQN | |
| PLNGAVHLYAQA | 593 | PLNGAVHLYAQA | 249 | PLNGAVHLYAQ | 627 | PLNGAVHLYAQ | 592 |
| QTLSVQN | | QVAAVQN | | AQRQLVQN | | AQTYAVQN | |
| PLNGAVHLYAQA | 203 | PLNGGVHLYAQA | 759 | PLNGAVHLYAQ | 495 | QLNGNVHLYAQ | 540 |
| QTVSVQN | | QTGSVQN | | AQVQGVQN | | AQTGWVQN | |
| PLNGAVHLYAQA | 286 | PLNGAVHLYAQA | 421 | PLNGAVHLYAQ | 207 | PLNGAVHLYAQ | 163 |
| QVSSVQN | | QTSMVQN | | AQVTGVQN | | AQTQKVQN | |
| PLNGNVHLYAQA | 448 | PLNGAVHLYAQA | 1027 | PLNGAVHLYAQ | 321 | PLNGAVHLYAQ | 143 |
| QTGWVQN | | QTVWVQN | | AQVSTVQN | | AQTTKVQN | |
| PLNGAVHLYAQA | 179 | PLNGAVHLYAQA | 292 | PLNGAVHLYAQ | 441 | PLNGAVHLYAQ | 376 |
| QTSPVQN | | QTAMVQN | | AQNASVQN | | AQIAGVQN | |
| QLNGAVHLYAQA | 856 | PLNGAVHLYAQA | 426 | PLNGAVHLYAQ | 460 | PLNGAVHLYAQ | 472 |
| QTGLVQN | | QTGAVQN | | AQRVEVQN | | AQTQNVQN | |
| PLNGAVHLYAQA | 185 | PLNGAVHLYAQA | 284 | PLNGAVHLYAQ | 740 | PLNGAVHLYAQ | 361 |
| QVSPVQN | | QVATVQN | | AQATGVQN | | AQLAHVQN | |
| PLNGAVHLYAQA | 225 | PLNGAVHLYAQA | 500 | PLNGAVHLYAQ | 945 | PLNGAVHLYAQ | 586 |
| QTMSVQN | | QQSPVQN | | AQAMSVQN | | AQNTQVQN | |
| PLNGAVHLYAQA | 168 | PLNGAVHLYAQA | 612 | PLNGAVHLYAQ | 383 | PLNGAVHLYAQ | 493 |
| QLSPVQN | | QTQAVQN | | AQRNSVQN | | AQRQQVQN | |
| PLNGAVHLYAQA | 274 | PLNGAVHLYAQA | 238 | PLNGAVHLYAQ | 208 | PLNGAVHLYAQ | 447 |
| QVASVQN | | QVQAVQN | | AQVMQVQN | | AQTGWFQN | |
| SLDGAVHLYAQA | 381 | PLNGAVHLYAQA | 359 | PLNGAVHLYAQ | 367 | PLNGAVHLYAQ | 259 |
| QTGWVQN | | QRSPVQN | | AQSMQVQN | | AQRAQVQN | |
| PLNGAVHLYAQA | 356 | PLNGAVHLYAQA | 236 | PLNGAVHLYAQ | 467 | PLNGAVHLYAQ | 385 |
| QTALVQN | | QLATVQN | | AQLQQVQN | | AQTKQVQN | |
| PLNGAVHLYAQA | 239 | PLNGAVHLYAQA | 149 | PLNGAVHLYAQ | 341 | PLNGAVHLYAQ | 302 |
| QTTSVQN | | QVAQVQN | | AQTMGVQN | | AQTQHVQN | |
| PLNGAVHLYAQA | 384 | PLNGAVHLYAQA | 310 | PLNGAVHLYAQ | 387 | PLNGAVHLYAQ | 587 |
| QTLPVQN | | QLAAVQN | | AQLGQVQN | | AQTGWLQN | |
| HLNGAVHLYAQA | 665 | PLNGAVHLYAQA | 765 | PLDGAVHLYAQ | 144 | PLNGAVHLYAQ | 194 |
| QTGWVQN | | QTGWVKN | | AQTGSVQN | | AQTNQVQN | |
| PLNGAVHLYAQA | 461 | PLNGAVHLYAQA | 199 | PLDSAVHLYAQ | 315 | PLNGAVHLYAQ | 268 |
| QVLPVQN | | QRSTVQN | | AQTGWVQN | | AQLMQVQN | |
| PLNGAVHLYAQA | 817 | ALDGAVHLYAQA | 235 | PLNGAVHLYAQ | 415 | PLNGAVHLYAQ | 473 |
| QRGWVQN | | QTGWVQN | | AQTSHVQN | | AQVNAVQN | |
| PLNGAVHLYAQA | 689 | PLNGAVHLYAQA | 334 | PLNGAVHLYAQ | 197 | PLNGAVHLYAQ | 380 |
| QLSGVQN | | QRTLVQN | | AQAAPVQN | | AQVQTVQN | |
| PLNGAVHLYAQA | 303 | PLNGAVHLYAQA | 524 | PLNGAVHLYAQ | 453 | PLNGAVHLYAQ | 503 |
| QLASVQN | | QLGTVQN | | AQRSQVQN | | AQTQRVQN | |
| PLNGAVHLYAQA | 219 | PLNGAVHLYAQA | 475 | PLNGAVHLYAQ | 832 | PLNGAVHLYAQ | 210 |
| QSSPVQN | | QLMSVQN | | AQTYSVQN | | AQVGKVQN | |
| PLNGAVHLYAQA | 551 | PLNGAVHLYAQA | 193 | PLNGAVHLYAQ | 337 | PLNGAVHLYSQ | 378 |
| QLLPVQN | | QLGPVQN | | AQITPVQN | | AQTGRVQN | |
| ALNGTVHLYAQA | 724 | PLNGAVHLYAQA | 471 | PLNGAVHLYAQ | 227 | PLNGAVHLYAQ | 154 |
| QTGWVQN | | QRTSVQN | | AQVAKVQN | | AQVKQVQN | |
| QLNGAVHLYAQA | 585 | PLNGAVHLYAQA | 510 | PLNGAVHLYAQ | 336 | PLNGGVHLYAQ | 165 |
| QTGSVQN | | QSQPVQN | | AQTQMVQN | | AQTGRVQN | |
| ALNGAVHLYAQA | 485 | PLNGAVHLYAQA | 522 | PLNGAVHLYAQ | 253 | PLDGAVHLYAQ | 140 |
| QTGLVQN | | QVLGVQN | | AQTKAVQN | | PQTGWVQN | |
| PLNGAVHLYAQA | 517 | PLNGAVHLYAQA | 894 | PLNGAVHLYAQ | 778 | PLNGAVHLYAQ | 751 |
| QSTSVQN | | QSVSVQN | | AQSQQVQN | | AQTGWVLN | |
| PLNGAVHLYAQA | 442 | PLNGAVHLYAQA | 181 | PLNGAVHLYAQ | 191 | PLNGAVHLYAQ | 212 |
| QTSAVQN | | QTMQVQN | | AQISGVQN | | AQIQSVQN | |
| PINGAVHLYAQA | 588 | PLNGAVHLYAQA | 684 | PLNGAVHLYAQ | 296 | PLNGAVHLYAQ | 214 |
| QTGLVQN | | QSAVVQN | | AQVSRVQN | | AQLQRVQN | |
| PLNGAVHLYAQA | 175 | PLNGAVHLYAQA | 357 | PLNGAVHLYAQ | 502 | PLNGAVHLYAQ | 482 |
| QTTPVQN | | QLAGVQN | | AQTGWDQN | | AQTMMVQN | |
| PLNGSVHLYAQA | 660 | SLNGAVHLYAQA | 388 | ALNGAVHLYAQ | 241 | PLNGAVHLYAQ | 267 |
| QTGLVQN | | QTGRVQN | | AQTGRVQN | | AQVGNVQN | |
| PLNGAVHLYAQA | 641 | PLNGAVHLYAQA | 452 | PLNGAVHLYAQ | 358 | PLNGAVHLYAQ | 417 |
| QSALVQN | | QTGWVQT | | AQRTAVQN | | AQRIGVQN | |
| PVNGAVHLYAQA | 526 | PLNGAVHLYAQA | 290 | PLDGAVHVYAQ | 430 | PLNGAVHLYAQ | 309 |
| QTGLVQN | | QSGPVQN | | AQTGWVQN | | AQTGWVRN | |
| PLNGAVHLYAQA | 432 | PLNGAVHLYAQA | 288 | PLDGAVHLYSQ | 370 | PLNGAVHLYAQ | 161 |
| QLGSVQN | | QTNSVQN | | AQTGWVQN | | AQSAKVQN | |
| PLNGAVHLYAQA | 237 | PLNGAVHLYAQA | 543 | PLNGAVHLYAQ | 624 | PLNGAVHLYAQ | 173 |
| QVTPVQN | | QRLTVQN | | AQRMLVQN | | AQRIAVQN | |
| PLNGAVHLYAQA | 300 | ALNGAVHLYAQS | 1047 | PLNGAVHLYAQ | 929 | PLNGAVHLYAQ | 436 |
| QVSAVQN | | QTGWVQN | | AQSQMVQN | | AQVQNVQN | |
| PLNGAVHLYAQA | 852 | PLNGAVHLYAQA | 170 | PLNGAVHLYAQ | 196 | PLNGAVHLYAQ | 393 |
| QIGWVQN | | QTTQVQN | | AQVANVQN | | AQNVQVQN | |
| PLNGAVHLYAQA | 640 | PLNGAVHLYAQA | 469 | PLNGAVHLYAQ | 240 | PLNGAVHLYAQ | 456 |
| QTGFVQN | | QSAAVQN | | AQCTPVQN | | AQRIPVQN | |
| PLNGAVHLYAQA | 177 | PLNGAVHLYAQA | 262 | PLNGAVHLYAQ | 326 | PLNGAVHLYAQ | 305 |
| QLTPVQN | | QTSVVQN | | PQTGLVQN | | AQNAQVQN | |
| PLNGAVHLYAQA | 360 | PLNGAVHLYAQA | 332 | PLNGAVHLYAQ | 273 | PLNGAVHLYAQ | 480 |
| QTLAVQN | | QRLGVQN | | AQISSVQN | | AQTGWVQS | |
| QLNGAVHLYAQA | 719 | PLNGGVHLYAQA | 983 | PLNGAVHLYAQ | 220 | PLNGYVHLYAQ | 1009 |
| QTGGVQN | | QTGGVQN | | AQAGPVQN | | AQTGWVQN | |
| PLNGAVHLYAQA | 658 | PLNGAVHLYAQA | 635 | PLNGAVHLYAQ | 160 | PLNGAVHLYAQ | 841 |
| QLSAVQN | | QTGWVQK | | AQTAKVQN | | AQTGWVQY | |
| PLNGAVHLYAQA | 229 | PLNGAVHLYAQA | 174 | PLNGAVHLYAQ | 282 | PLNGAVHLYAQ | 392 |
| QTVGVQN | | QRASVQN | | AQRTGVQN | | AQNMQVQN | |
| PLNGAVHLYAQA | 256 | PLNGAVHLYAQA | 498 | PLNGAVHLYAQ | 258 | PLNGAVHLYAQ | 349 |
| QTAPVQN | | QSTQVQN | | AQLHPVQN | | AQTGWAQN | |
| PLNGAVHLYAQA | 318 | PLNGAVHLYAQA | 213 | PLNGAVHLYAQ | 276 | PLNGAVHLYAQ | 804 |
| QTMPVQN | | QCSPVQN | | AQTMTVQN | | AQTGWVEN | |
| PLNGAVHLYAQA | 362 | PLNGAVHLYAQA | 507 | PLNGAVHLYAQ | 561 | PLNGNVHLYAQ | 189 |
| QTSLVQN | | QSAGVQN | | AQAQPVQN | | AQTGGVQN | |
| PLNGAVHLYAQA | 343 | PLNGAVHLYAQA | 1038 | PLNGAVHLYAQ | 304 | PLDGAVHLYAQ | 150 |
| QVQSVQN | | QALPVQN | | AQQAPVQN | | AQTGGVQN | |
| PLNGAVHLYAQA | 783 | PLNGAVHLYAQA | 285 | PLNGAVHLYAQ | 188 | PLNGAVHLYAQ | 801 |
| QSSMVQN | | QVTSVQN | | AQRQPVQN | | AQTPSVQN | |
| PLNGAVHLYAQA | 1015 | PLNGAVHLYAQA | 346 | PLNGAVHLYAQ | 250 | PLNGAVHLYAQ | 458 |
| QSLPVQN | | QISPVQN | | AQLKSVQN | | AQTGWVQD | |
| PLNGAVHLYAQA | 184 | PLNGAVHLYAQA | 438 | PLNGAVHLYAQ | 568 | PLNGAVHLYAQ | 260 |
| QVSQVQN | | QSVGVQN | | AQNTTVQN | | AQLTNVQN | |
| PLNGAVHLYAQA | 277 | PLNGAVHLYAQA | 451 | RLDGAVHLYAQ | 602 | QLNGAVHLYAQ | 1032 |
| QRSSVQN | | QLTSVQN | | AQTGWVQN | | AQTGWVKN | |
| PLNGAVHLYAQA | 246 | PLNGAVHLYAQA | 222 | PLNGAVHLYAQ | 182 | PLNGAVHLYAQ | 218 |
| QTSTVQN | | QTTTVQN | | AQTSKVQN | | AQVTKVQN | |
| PLNGAVHLYAQA | 399 | PLNGAVHLYAQA | 312 | PLNGSVHLYAQ | 572 | QLNGAVHLYAQ | 735 |
| QVMSVQN | | QRSGVQN | | PQTGWVQN | | AQTGWVQT | |
| PLNGAVHLYAQA | 308 | PLNGAVHLYAQA | 490 | PLNGAVHLYAQ | 501 | ALNGAVHLYAQ | 1061 |
| QTTAVQN | | QTQLVQN | | AQRYSVQN | | AQTGWVQK | |
| PLNGSVHLYAQA | 294 | PLNGAVHLYAQA | 230 | PLNGAVHLYAQ | 861 | ALNGAVHLYAQ | 678 |
| QTGSVQN | | QLNPVQN | | AQKSSVQN | | AQTGWVQT | |
| PLNGAVHLYAQA | 293 | PLNGTVHLYAQA | 395 | PLNGAVHLYAQ | 323 | QLNGAVHLYAQ | 980 |
| QTQPVQN | | QTGGVQN | | AQNTPVQN | | AQTGWVQK | |
| PLNGAVHLYAQA | 468 | PLNGAVHLYAQA | 186 | PLNGAVHLYAQ | 352 | ALNGAVHLYAQ | 1081 |
| QLSTVQN | | QTVQVQN | | AQVGGVQN | | AQTGWVKN | |
| PLNGAVHLYAQA | 157 | PLNGAVHLYAQA | 202 | PLNGAVHLYAQ | 251 | QLNGAVHLYAQ | 961 |
| QLAPVQN | | QIASVQN | | AQIAAVQN | | AQTVSVQN | |
| PLNGAVHLYAQA | 166 | PLNGAVHLYAQA | 158 | PLNGAVHLYAQ | 317 | PLDSSVHLYAQ | 142 |
| QTVAVQN | | QLAQVQN | | AQLMAVQN | | AQTGWVQN | |
| PLNGAVHLYAQA | 363 | PLNGAVHLYAQA | 404 | PLNGAVHLYAQ | 407 | PLNGSVHLYAQ | 791 |
| QRLSVQN | | QLSRVQN | | AQMAPVQN | | AQTGWVKN | |
| PLNGAVHLYAQA | 862 | PLNGAVHLYAQA | 536 | PLNGAVHLYAQ | 271 | QLNGAVHLYAQ | 959 |
| QTGYVQN | | QLSNVQN | | AQVHPVQN | | AQTGWDQN | |
| PLNGAVHLYAQA | 425 | PLNGAVHLYAQA | 400 | PLNGAVHLYAQ | 301 | QLNGAVHLYAQ | 1113 |
| QTSGVQN | | QTTGVQN | | AQVLSVQN | | AQPGWVQN | |
| PLNGAVHLYAQA | 243 | PLNGAVHLYAQA | 913 | PLNGAVHLYAQ | 320 | PLNGAVHLYAQ | 559 |
| QTAGVQN | | QTSNVQN | | AQLANVQN | | AQLPPVQN | |
| PLNGAVHLYAQA | 616 | PLNGAVHLYAQA | 209 | PLNGAVHLYAQ | 601 | PLNGAVHLYAQ | 695 |
| QVMPVQN | | QSMAVQN | | AQATQVQN | | AQSPPVQN | |
| PLNGAVHLYAQA | 244 | PLNGAVHLYAQA | 437 | PLNGAVHLYAQ | 234 | PLNGSVHLYAQ | 748 |
| QTSQVQN | | QTKSVQN | | AQTNAVQN | | AQTGWVQK | |
| PLNGAVHLYAQA | 200 | PLNGAVHLYAQA | 465 | PLNGAVHLYAQ | 446 | PLNGGVHLYAQ | 864 |
| QTMAVQN | | QSVAVQN | | AQTANVQN | | AQTGWVKN | |
| PLNGAVHLYAQA | 372 | PLNGAVHLYAQA | 295 | PLNGAVHLYAQ | 255 | PLNGAVHLYAQ | 727 |
| QVGSVQN | | QTQQVQN | | AQVSNVQN | | AQTPAVQN | |
| PLNGAVHLYAQA | 564 | PLNGAVHLYAQA | 195 | PLNGAVHLYAQ | 683 | PVNGAVHLYAQ | 1051 |
| QTSWVQN | | QVQQVQN | | AQAAAVQN | | AQTGWVQT | |
| PLNGAVHLYAQA | 988 | PLNGAVHLYAQA | 537 | PLNGAVHLYAQ | 787 | PLNGSVHLYAQ | 366 |
| QTGVVQN | | QRLPVQN | | AQAVGVQN | | AQTGWVQT | |
| PLNGAVHLYAQA | 411 | PLNCAVHLYAQA | 975 | PLNGAVHLYAQ | 435 | PLNGGVHLYAQ | 906 |
| QTGTVQN | | QTGWVQN | | AQLTAVQN | | AQTGWVQK | |
| PLNGAVHLYAQA | 628 | PLNGAVHLYAQA | 420 | PLNGAVHLYAQ | 758 | PLNGAVHLYAQ | 992 |
| QTLGVQN | | QSAMVQN | | AQSANVQN | | AQTGCVQK | |
| PLNGAVHLYAQA | 257 | PLNGAVHLYAQA | 331 | PLNGAVHLYAQ | 525 | SLNGAVHLYAQ | 1095 |
| QLMPVQN | | QTAVVQN | | AQRAGVQN | | AQTGWVQH | |
| PLNGAVHLYAQA | 307 | PLNGAVHLYAQA | 574 | PLNGAVHLYAQ | 538 | | |
| QVQPVQN | | QTQWVQN | | AQRQGVQN | | | |
| PLNGAVHLYAQA | 535 | PLNGAVHLYAQA | 693 | PLNGAVHLYAQ | 544 | | |
| QTGMVQN | | QSSRVQN | | AQTLRVQN | | | |

TABLE 2
Exemplary Peptide

| | SEQ | | SEQ | |
|---|---|---|---|---|
| Pep- | ID | Amino Acid | ID | |
| tide | NO: | Sequence | NO: | Nucleotide Sequence |
| 1 | 3648 | PLNGAVHLY | 3660 | ccgcttaatggtgccgtccatct |
| | | | | ttat |
| 2 | 3649 | RDSPKGW | 3661 | cgtgattctccgaagggttggca |
| 3 | 3650 | YSTDVRM | 3662 | tattctacggatgtgaggatgca |
| 4 | 3651 | IVMNSLK | 3663 | attgttatgaattcgttgaaggc |
| 5 | 3652 | RESPRGL | 3664 | cgggagagtcctcgtgggctgca |
| 6 | 3653 | SFNDTRA | 3665 | agttttaatgatactagggctca |
| 7 | 3654 | GGTLAVVSL | 3666 | ggtggtacgttggccgtcgtgtc |
| | | | | gctt |
| 8 | 3655 | YGLPKGP | 3667 | tatgggttgccgaagggtcct |
| 9 | 3656 | STGTLRL | 3668 | tcgactgggacgcttcggctt |
| 10 | 3657 | YSTDERM | 3669 | tattcgacggatgagaggatg |
| 11 | 3658 | YSTDERK | 3670 | tattcgacggatgagaggaag |
| 12 | 3659 | YVSSVKM | 3671 | Tatgtttcgtctgttaagatg |
| 13 | 314 | PLNGAVHLYA | 6 | ccgcttaatggtgccgtccatct |
| | | QAQTGWVPN | | ttatGCTCAGGCGCAGACCGGCT |
| | | | | GGGTTccgAAC |
| 14 | 566 | PLNGAVHLYA | 9 | CCGCTGAATGGTGCGGTGCATCT |
| | | QAQLSPVKN | | GTATGCGCAGGCGCAGCTGTCTC |
| | | | | CGGTGAAGAAT |

[1648] In some embodiments, the peptide comprises an amino acid sequence comprising the following formula [N1]-[N2], wherein [N1] comprises X1, X2, X3, X4, and X5, and [N2] comprises the amino acid sequence of VHLY (SEQ ID NO: 4680), VHIY (SEQ ID NO: 4681), VHVY (SEQ ID NO: 4682), or VHHY (SEQ ID NO: 4683). In some embodiments, position X1 of [N1] is: P, Q, A, H, K, L, R, S, or T. In some embodiments, position X2 of [N1] is: L, I, V, H, or R. In some embodiments, position X3 of [N1] is: N, D, I, K, or Y. In some embodiments, position X4 of [N1] is: G, A, C, R, or S. In some embodiments, position X5 of [N1] is: A, 5, T, G, C, D, N, Q, V, or Y. In some embodiments [N1] comprises AL, PI, PL, QL, SL, TL, LN, LD, IN, NG, DG, DS, GA, SA, SS, GG, GN, GS, or GT. In some embodiments, [N1] comprises ALD, ALN, PIN, PLD, PLN, QLN, SLD, SLN, TLN, LNG, LDG, ING, LDS, NGA, DGA, DSA, DSS, NGG, NGN, NGS, NGT. In some embodiments, [N1] is or comprises SLNGA (SEQ ID NO: 4684), QLNGA (SEQ ID NO: 4685), ALNGA (SEQ ID NO: 4686), PLNGS (SEQ ID NO: 4687), PVNGA (SEQ ID NO: 4688), PLNGA (SEQ ID NO: 3679), PLNGG (SEQ ID NO: 4689), PLNGT (SEQ ID NO: 4690), PLDGA (SEQ ID NO: 469i), QLNGS (SEQ ID NO: 4692), PLNGN (SEQ ID NO: 4693), SLDGA (SEQ ID NO: 4694), HLNGA (SEQ ID NO: 4695), ALNGT (SEQ ID NO: 4696), PINGA (SEQ ID NO: 4697), ALDGA (SEQ ID NO: 4698), PLNCA (SEQ ID NO: 4699), PLNGQ (SEQ ID NO: 4700), PLDSA (SEQ ID NO: 4701), RLDGA (SEQ ID NO: 4702), QLNGN (SEQ ID NO: 4703), PLNGY (SEQ ID NO: 4704), PLDSS (SEQ ID NO: 4705), PLNGC (SEQ ID NO: 4706), PLYGA (SEQ ID NO: 4707), TLNGA (SEQ ID NO: 4708), PVDGA (SEQ ID NO: 4709), PLKGA (SEQ ID NO: 4710), PLNGD (SEQ ID NO: 4711), KLDGA (SEQ ID NO: 4712), PHNGA (SEQ ID NO: 4713), PLNGV (SEQ ID NO: 4714), PLNAA (SEQ ID NO: 4715), QLNGY (SEQ ID NO: 4716), PLDGS (SEQ ID NO: 4717), LLNGA (SEQ ID NO: 4718), PLNRA (SEQ ID NO: 4719), PLIGA (SEQ ID NO: 4720), PRNGA (SEQ ID NO: 4721), or ALNGS (SEQ ID NO: 4722). In some embodiments, [N1] is or comprises ALDGA (SEQ ID NO: 4698), ALNGA (SEQ ID NO: 4686), PINGA (SEQ ID NO: 4697), PLDGA (SEQ ID NO: 4691), PLDSA (SEQ ID NO: 4701), PLDSS (SEQ ID NO: 4705), PLNGA (SEQ ID NO: 3679), PLNGG (SEQ ID NO: 4689), PLNGN (SEQ ID NO: 4693), PLNGS (SEQ ID NO: 4687), PLNGT (SEQ ID NO: 4690), QLNGA (SEQ ID NO: 4685), SLDGA (SEQ ID NO: 4694), SLNGA (SEQ ID NO: 4684), or TLNGA (SEQ ID NO: 4708). In some embodiments, wherein [N1]-[N2] comprises LDGAVHLY (SEQ ID NO: 4768), LNGAVHLY (SEQ ID NO: 4769), INGAVHLY (SEQ ID NO: 4770), LDSAVHLY (SEQ ID NO: 4771), LDSSVHLY (SEQ ID NO: 4772), LNGGVHLY (SEQ ID NO: 4773), LNGNVHLY (SEQ ID NO: 4774), LNGSVHLY (SEQ ID NO: 4775), LNGTVHLY (SEQ ID NO: 4776), LNGAVHIY (SEQ ID NO: 4777), LDGAVHVY (SEQ ID NO: 4778), LNGAVHHY (SEQ ID NO: 4779). In some embodiments, [N1]-[N2] is or comprises ALDGAVHLY (SEQ ID NO: 4780), ALNGAVHLY (SEQ ID NO: 4781), PINGAVHLY (SEQ ID NO: 4782), PLDGAVHLY (SEQ ID NO: 4783), PLDSAVHLY (SEQ ID NO: 4784), PLDSSVHLY (SEQ ID NO: 4785), PLNGAVHLY (SEQ ID NO: 3648), PLNGGVHLY (SEQ ID NO: 4786), PLNGNVHLY (SEQ ID NO: 4787), PLNGSVHLY (SEQ ID NO: 4788), PLNGTVHLY (SEQ ID NO: 4789), QLNGAVHLY (SEQ ID NO: 4790), SLDGAVHLY (SEQ ID NO: 4791), SLNGAVHLY (SEQ ID NO: 4792), TLNGAVHLY (SEQ ID NO: 4793), PLNGAVHIY (SEQ ID NO: 4794), PLDGAVHVY (SEQ ID NO: 4795), PLNGAVHHY (SEQ ID NO: 4796); an amino acid sequence comprising any portion of any of the aforesaid amino acid sequences (e.g., any 2, 3, 4, 5, 6, 7, or 8 amino acids, e.g., consecutive amino acids) thereof; an amino acid sequence comprising at least one, two, or three but no more than four modifications, e.g., substitutions (e.g., conservative substitutions), insertions, or deletions, relative to any of the aforesaid amino acid sequences; or an amino acid sequence comprising at least one, two, or three but no more than four different amino acids, relative to any one of the aforesaid amino acid sequences.

[1649] In some embodiments, the peptide comprising the amino acid sequence comprising the formula of [N1]-[N2], further comprises [N3], which comprises X6, X7, X8, and X9. In some embodiments, position X6 of [N3] is: A, D, S, or T. In some embodiments, position X7 of [N3] is: Q, K, H, L, P, or R. In some embodiments, position X8 of [N3] is: A, P, E, or R. In some embodiments, position X9 of [N3] is Q, H, K, or P. In some embodiments, [N3] comprises AQ, SQ, AK, DQ, PQ, QA, QP, or KA. In some embodiments, [N3] comprises AQA, AQP, SQA, AKA, DQA, QAQ, QPQ, or KAQ. In some embodiments, [N3] is or comprises AQAQ (SEQ ID NO: 4737), SQAQ (SEQ ID NO: 4738), AQPQ (SEQ ID NO: 4739), AQSQ (SEQ ID NO: 4740), AKAQ (SEQ ID NO: 4741), AHAQ (SEQ ID NO: 4742), AQAP (SEQ ID NO: 4743), DQAQ (SEQ ID NO: 4744), APAQ (SEQ ID NO: 4745), AQAK (SEQ ID NO: 4746), AQAH (SEQ ID NO: 4747), AQEQ (SEQ ID NO: 4748), ALAQ (SEQ ID NO: 4749), ARAQ (SEQ ID NO: 4750), or TQAQ (SEQ ID NO: 4751). In some embodiments, [N3] is or comprises AQAQ (SEQ ID NO: 4737), AQPQ (SEQ ID NO: 4739), SQAQ (SEQ ID NO: 4738), AKAQ (SEQ ID NO: 4741), or DQAQ (SEQ ID NO: 4744). In some embodiments, is or comprises ALDGAVHLYAQAQ (SEQ ID NO: 4827), ALNGAVHLYAQAQ (SEQ ID NO: 4828), PINGAVHLYAQAQ (SEQ ID NO: 4829), PLDGAVHLYAQAQ (SEQ ID NO: 4830), PLDGAVHLYAQPQ (SEQ ID NO: 4831), PLDGAVHLYSQAQ (SEQ ID NO: 4832), PLDSAVHLYAQAQ (SEQ ID NO: 4833), PLDSSVHLYAQAQ (SEQ ID NO: 4834), PLNGAVHLYAKAQ (SEQ ID NO: 4835), PLNGAVHLYAQAQ (SEQ ID NO: 4836), PLNGAVHLYAQPQ (SEQ ID NO: 4837), PLNGAVHLYDQAQ (SEQ ID NO: 4838), PLNGAVHLYSQAQ (SEQ ID NO: 4839), PLNGGVHLYAQAQ (SEQ ID NO: 4840), PLNGNVHLYAQAQ (SEQ ID NO: 4841), PLNGSVHLYAQAQ (SEQ ID NO: 4842), PLNGTVHLYAQAQ (SEQ ID NO: 4843), QLNGAVHLYAQAQ (SEQ ID NO: 4844), SLDGAVHLYAQAQ (SEQ ID NO: 4845), SLNGAVHLYAQAQ (SEQ ID NO: 4846), TLNGAVHLYAQAQ (SEQ ID NO: 4847), PLNGAVHIYAQAQ (SEQ ID NO: 4848), PLDGAVHVYAQAQ (SEQ ID NO: 4849), PLNGAVHHYAQAQ (SEQ ID NO: 4850); an amino acid sequence comprising any portion of any of the aforesaid amino acid sequences (e.g., any 2, 3, 4, 5, 6, 7, 8, 9, 10, 11, or 12 amino acids, e.g., consecutive amino acids) thereof; an amino acid sequence comprising at least one, two, or three but no more than four modifications, e.g., substitutions (e.g., conservative substitutions), insertions, or deletions, relative to any of the aforesaid amino acid sequences; or an amino acid sequence comprising at least one, two, or three but no more than four different amino acids, relative to any one of the aforesaid amino acid sequences.

[1650] In some embodiments, the peptide comprising the amino acid sequence comprising the formula [N1]-[N2], further comprises [N4], which comprises X10, X11, and X12. In some embodiments, position X10 of [N4] is: T, V, L, R, S, A, C, I, K, M, N, P, or Q. In some embodiments, position X1I of [N4] is: G, S, A, T, M, V, Q, L, H, I, K, N, P, R, or Y. In some embodiments, position X12 of [N4] is: W, S, P, G, A, Q, L, M, K, C, E, F, H, R, T, V, or Y. In some embodiments, [N4] comprises LS, TG, LA, LT, SA, SS, TL, TT, TS, TA, TV, VS, AA, AG, AS, AT, CS, CT, IA, IG, IL, IQ, IS, IT, LG, LH, LK, LM, LN, LQ, MA, NA, NM, NS, NT, NV, QA, RA, RG, RI, RL, RM, RN, RQ, RS, RT, RV, SG, SM, ST, SV, TK, TM, TN, TP, TQ, TR, VA, VG, VH, VK, VL, VM, VN, VQ, VR, VT, PG, LV, SP, GW, AP, GR, AL, AW, GG, GS, GP, QP, QS, AH, AN, AQ, AR, GQ, HP, KS, MG, MP, MQ, MS, NP, QQ, QR, SH, SK, SQ, SR, IP, VE, AK, AM, AV, GA, GC, GT, KA, KP, KQ, LP, MK, MN, MT, NQ, PP, QH, QK, QM, QN, QT, RW, SL, VW, GK, GN, NG, RP, SN, GL, or VP. In some embodiments, [N4] is or comprises TGW, TGL, TGS, TGG, TAW, TGR, TAS, LSS, TSS, SSL, SSS, TLS, TVS, VSS, TSP, VSP, TMS, LSP, VAS, TAL, TTS, TLP, VLP, RGW, LSG, LAS, SSP, LLP, STS, TSA, TTP, SAL, LGS, VTP, VSA, IGW, TGF, LTP, TLA, LSA, TVG, TAP, TMP, TSL, VQS, SSM, SLP, VSQ, RSS, TST, VMS, TTA, TQP, LST, LAP, TVA, RLS, TGY, TSG, TAG, VMP, TSQ, TMA, VGS, TSW, TGV, TGT, TLG, LMP, VQP, TGM, SMS, SQL, IGS, RSV, TAA, STP, LSQ, TAQ, TGP, ASP, VSG, SAP, TLQ, LQP, TAT, TGQ, ATS, IGG, VAA, TSM, TVW, TAM, TGA, VAT, QSP, TQA, VQA, RSP, LAT, VAQ, LAA, RST, RTL, LGT, LMS, LGP, RTS, SQP, VLG, SVS, TMQ, SAV, LAG, SGP, TNS, RLT, TTQ, SAA, TSV, RLG, RAS, STQ, CSP, SAG, ALP, VTS, ISP, SVG, LTS, TTT, RSG, TQL, LNP, TVQ, IAS, LAQ, LSR, LSN, TTG, TSN, SMA, TKS, SVA, TQQ, VQQ, RLP, SAM, TAV, TQW, SSR, TQT, VNS, RSA, LMG, RQS, LVG, VTA, RTT, SMG, VMA, TKP, SAQ, NSP, ATP, VAG, RGS, VKP, RMS, NLP, NAL, RTP, RQL, VQG, VTG, VST, NAS, RVE, ATG, AMS, RNS, VMQ, SMQ, LQQ, TMG, LGQ, TSH, AAP, RSQ, TYS, ITP, VAK, TQM, TKA, SQQ, ISG, VSR, RTA, RML, SQM, VAN, CTP, ISS, AGP, TAK, RTG, LHP, TMT, AQP, QAP, RQP, LKS, NTT, TSK, RYS, KSS, NTP, VGG, IAA, LMA, MAP, VHP, VLS, LAN, ATQ, TNA, TAN, VSN, AAA, AVG, LTA, SAN, RAG, RQG, TLR, LSH, SAF, RAA, IQP, ILG, VNG, SVQ, LSK, TNG, RTQ, TMN, RGG, TTR, VRP, VKA, LAR, NQP, TMK, TYA, TQK, TTK, IAG, TQN, LAH, NTQ, RQQ, RAQ, TKQ, TQH, TNQ, LMQ, VNA, VQT, TQR, VGK, VKQ, IQS, LQR, TMM, VGN, RIG, SAK, RIA, VQN, NVQ, RIP, NAQ, NMQ, TPS, LTN, VTK, PGW, LPP, SPP, TPA, TGC, VPP, TPT, TPW, TPP, RPP, TPQ, TPR, TPG, VPA, VPQ, RPG, KGW, TRW, TAR, IPP, RSL, LVP, KGS, VAP, KGG, KAW, PGS, TRL, or AGW.

[1651] In some embodiments, the peptide comprising the amino acid sequence comprising the formula [N1]-[N2], further comprises [N5] which comprises X13, X14, and X15. In some embodiments, position X13 of [N5] is: V, D, F, G, L, A, E, or I. In some embodiments, position X14 of [N5] is: Q, K, R, H, E, L, or P. In some embodiments, position X15 of [N5] is: N, T, K, H, D, Y, S, I, or P. In some embodiments, [N5] comprises VQ, AQ, DQ, FQ, VL, LQ, EQ, GQ, VP, VR, VK, QN, QS, QT, QK, QH, LN, QI, PN, QD, QP, RN, or KN. In some embodiments, [N5] is or comprises VQN, VKN, VQT, VQK, DQN, VQH, GQN, VQI, VHN, FQN, LQN, VLN, VRN, VQS, VQY, AQN, VEN, VQD, VPN, IQN, VKK, DKN, VKT, VQP, EQN, GQT, FQK, GHN, or VPH. In some embodiments [N5] is or comprises VQN, AQN, VQS, DQN, VQT, VQK, VQH, FQN, VLN, LQN, VQI, EQN, GQT, VPN, VQD, VQP, VRN, or VKN. In some embodiments [N4]-[N5] is or comprises TGWVQN (SEQ ID NO: 4851), LAAVQN (SEQ ID NO: 4852), LTPVQN (SEQ ID NO: 4853), SAPVQN (SEQ ID NO: 4854), SSPVQN (SEQ ID NO: 4855), TGRVQN (SEQ ID NO: 4856), TGWAQN (SEQ ID NO: 4857), TGWVQS (SEQ ID NO: 4858), TLAVQN (SEQ ID NO: 4859), TTSVQN (SEQ ID NO: 4860), TSPVQN (SEQ ID NO: 4861), TALVQN (SEQ ID NO: 4862), TAWVQN (SEQ ID NO: 4863), TGGVQN (SEQ ID NO: 4864), TGSVQN (SEQ ID NO: 4865), TGWDQN (SEQ ID NO: 4866), TVSVQN (SEQ ID NO: 4867), VSPVQN (SEQ ID NO: 4868), VSSVQN (SEQ ID NO: 4869), AAPVQN (SEQ ID NO: 4870), AGPVQN (SEQ ID NO: 4871), ASPVQN (SEQ ID NO: 4872), ATPVQN (SEQ ID NO: 4873), CSPVQN (SEQ ID NO: 4874), CTPVQN (SEQ ID NO: 4875), IAAVQN (SEQ ID NO: 4876), IAGVQN (SEQ ID NO: 4877), IASVQN (SEQ ID NO: 4878), IGGVQN (SEQ ID NO: 4879), IGSVQN (SEQ ID NO: 4880), ILGVQN (SEQ ID NO: 4881), IQPVQN (SEQ ID NO: 4882), IQSVQN (SEQ ID NO: 4883), ISGVQN (SEQ ID NO: 4884), ISPVQN (SEQ ID NO: 4885), ISSVQN (SEQ ID NO: 4886), ITPVQN (SEQ ID NO: 4887), LAGVQN (SEQ ID NO: 4888), LAHVQN (SEQ ID NO: 4889), LANVQN (SEQ ID NO: 4890), LAPVQN (SEQ ID NO: 4891), LAPVQT (SEQ ID NO: 4892), LAQVQN (SEQ ID NO: 4893), LARVQN (SEQ ID NO: 4894), LASVQN (SEQ ID NO: 4895), LATVQN (SEQ ID NO: 4896), LGPVQN (SEQ ID NO: 4897), LGQVQN (SEQ ID NO: 4898), LGSVQN (SEQ ID NO: 4899), LHPVQN (SEQ ID NO: 4900), LKSVQN (SEQ ID NO: 4901), LMAVQN (SEQ ID NO: 4902), LMGVQN (SEQ ID NO: 4903), LMPVQN (SEQ ID NO: 4904), LMQVQN (SEQ ID NO: 4905), LMSVQN (SEQ ID NO: 4906), LNPVQN (SEQ ID NO: 4907), LQPVQN (SEQ ID NO: 4908), LQQVQN (SEQ ID NO: 4909), LQRVQN (SEQ ID NO: 4910), LSHVQN (SEQ ID NO: 4911), LSKVQN (SEQ ID NO: 4912), LSPVQK (SEQ ID NO: 4913), LSPVQN (SEQ ID NO: 4914), LSQVQN (SEQ ID NO: 4915), LSRVQN (SEQ ID NO: 4916), LSTVQN (SEQ ID NO: 4917), LTAVQN (SEQ ID NO: 4918), LTNVQN (SEQ ID NO: 4919), LTSVQN (SEQ ID NO: 4920), MAPVQN (SEQ ID NO: 4921), NAQVQN (SEQ ID NO: 4922), NASVQN (SEQ ID NO: 4923), NMQVQN (SEQ ID NO: 4924), NSPVQN (SEQ ID NO: 4925), NTPVQN (SEQ ID NO: 4926), NVQVQN (SEQ ID NO: 4927), QAPVQN (SEQ ID NO: 4928), RAAVQN (SEQ ID NO: 4929), RAQVQN (SEQ ID NO: 4930), RASVQN (SEQ ID NO: 4931), RGGVQN (SEQ ID NO: 4932), RGSVQN (SEQ ID NO: 4933), RIAVQN (SEQ ID NO: 4934), RIGVQN (SEQ ID NO: 4935), RIPVQN (SEQ ID NO: 4936), RLGVQN (SEQ ID NO: 4937), RLSVQN (SEQ ID NO: 4938), RMSVQN (SEQ ID NO: 4939), RNSVQN (SEQ ID NO: 4940), RQPVQN (SEQ ID NO: 4941), RSAVQN (SEQ ID NO: 4942), RSGVQN (SEQ ID NO: 4943), RSPVQN (SEQ ID NO: 4944), RSQVQN (SEQ ID NO: 4945), RSSVQN (SEQ ID NO: 4946), RSTVQN (SEQ ID NO: 4947), RTAVQN (SEQ ID NO: 4948), RTGVQN (SEQ ID NO: 4949), RTLVQN (SEQ ID NO: 4950), RTSVQN (SEQ ID NO: 4951), RTTVQN (SEQ ID NO: 4952), RVEVQN (SEQ ID NO: 4953), SAAVQN (SEQ ID NO: 4954), SAKVQN (SEQ ID NO: 4955), SAMVQN (SEQ ID NO: 4956), SAQVQN (SEQ ID NO: 4957), SGPVQN (SEQ ID NO: 4958), SMAVQN (SEQ ID NO: 4959), SMGVQN (SEQ ID NO: 4960), SMQVQN (SEQ ID NO: 4961), SMSVQN (SEQ ID NO: 4962), STPVQN (SEQ ID NO: 4963), SVAVQN (SEQ ID NO: 4964), SVGVQN (SEQ ID NO: 4965), TAAVQN (SEQ ID NO: 4966), TAGVQN (SEQ ID NO: 4967), TAKVQN (SEQ ID NO: 4968), TAMVQN (SEQ ID NO: 4969), TANVQN (SEQ ID NO: 4970), TAPVQN (SEQ ID NO: 4971), TAPVQT (SEQ ID NO: 4972), TAQVQN (SEQ ID NO: 4973), TASVQN (SEQ ID NO: 4974), TASVQT (SEQ ID NO: 4975), TATVQN (SEQ ID NO: 4976), TAVVQN (SEQ ID NO: 4977), TAWDQN (SEQ ID NO: 4978), TAWVQH (SEQ ID NO: 4979), TAWVQT (SEQ ID NO: 4980), TGAVQN (SEQ ID NO: 4981), TGCFQN (SEQ ID NO: 4982), TGGAQN (SEQ ID NO: 4983), TGGFQN (SEQ ID NO: 4984), TGGVLN (SEQ ID NO: 4985), TGGVQH (SEQ ID NO: 4986), TGGVQK (SEQ ID NO: 4987), TGGVQT (SEQ ID NO: 4988), TGPVQN (SEQ ID NO: 4989), TGSAQN (SEQ ID NO: 4990), TGSLQN (SEQ ID NO: 4991), TGSVQH (SEQ ID NO: 4992), TGSVQI (SEQ ID NO: 4993), TGSVQS (SEQ ID NO: 4994), TGSVQT (SEQ ID NO: 4995), TGTVQN (SEQ ID NO: 4996), TGWEQN (SEQ ID NO: 4997), TGWFQN (SEQ ID NO: 4998), TGWGQT (SEQ ID NO: 4999), TGWVPN (SEQ ID NO: 5000), TGWVQD (SEQ ID NO: 5001), TGWVQP (SEQ ID NO: 5002), TGWVQT (SEQ ID NO: 5003), TGWVRN (SEQ ID NO: 5004), TKAVQN (SEQ ID NO: 5005), TKPVQN (SEQ ID NO: 5006), TKQVQN (SEQ ID NO: 5007), TKSVQN (SEQ ID NO: 5008), TLPVQN (SEQ ID NO: 5009), TLQVQN (SEQ ID NO: 5010), TMAVQN (SEQ ID NO: 5011), TMGVQN (SEQ ID NO: 5012), TMKVQN (SEQ ID NO: 5013), TMNVQN (SEQ ID NO: 5014), TMPVQN (SEQ ID NO: 5015), TMQVQN (SEQ ID NO: 5016), TMSVKN (SEQ ID NO: 5017), TMSVQN (SEQ ID NO: 5018), TMSVQT (SEQ ID NO: 5019), TMTVQN (SEQ ID NO: 5020), TNAVQN (SEQ ID NO: 5021), TNQVQN (SEQ ID NO: 5022), TNSVQN (SEQ ID NO: 5023), TPPVQN (SEQ ID NO: 5024), TQHVQN (SEQ ID NO: 5025), TQKVQN (SEQ ID NO: 5026), TQMVQN (SEQ ID NO: 5027), TQNVQN (SEQ ID NO: 5028), TQPVQN (SEQ ID NO: 5029), TQQVQN (SEQ ID NO: 5030), TQTVQN (SEQ ID NO: 5031), TRWDQN (SEQ ID NO: 5032), TSAVQN (SEQ ID NO: 5033), TSGVQN (SEQ ID NO: 5034), TSHVQN (SEQ ID NO: 5035), TSKVQN (SEQ ID NO: 5036), TSLVQN (SEQ ID NO: 5037), TSMVQN (SEQ ID NO: 5038), TSPDQN (SEQ ID NO: 5039), TSQVQN (SEQ ID NO: 5040), TSSVQN (SEQ ID NO: 5041), TSSVQT (SEQ ID NO: 5042), TSTVQN (SEQ ID NO: 5043), TSVVQN (SEQ ID NO: 5044), TTAVQN (SEQ ID NO: 5045), TTGVQN (SEQ ID NO: 5046), TTKVQN (SEQ ID NO: 5047), TTPVQN (SEQ ID NO: 5048), TTPVQT (SEQ ID NO: 5049), TTQVQN (SEQ ID NO: 5050), TTTVQN (SEQ ID NO: 5051), TVAVQN (SEQ ID NO: 5052), TVAVQT (SEQ ID NO: 5053), TVGVQN (SEQ ID NO: 5054), TVQVQN (SEQ ID NO: 5055), TVSVKN (SEQ ID NO: 5056), TVWVQK (SEQ ID NO: 5057), VAAVQN (SEQ ID NO: 5058), VAGVQN (SEQ ID NO: 5059), VAKVQN (SEQ ID NO: 5060), VANVQN (SEQ ID NO: 5061), VAQVQN (SEQ ID NO: 5062), VASVQN (SEQ ID NO: 5063), VATVQN (SEQ ID NO: 5064), VGGVQN (SEQ ID NO: 5065), VGKVQN (SEQ ID NO: 5066), VGNVQN (SEQ ID NO: 5067), VGSVQN (SEQ ID NO: 5068), VHPVQN (SEQ ID NO: 5069), VKAVQN (SEQ ID NO: 5070), VKPVQN (SEQ ID NO: 5071), VKQVQN (SEQ ID NO: 5072), VLPVQN (SEQ ID NO: 5073), VLSVQN (SEQ ID NO: 5074), VMAVQN (SEQ ID NO: 5075), VMQVQN (SEQ ID NO: 5076), VMSVQN (SEQ ID NO: 5077), VNAVQN (SEQ ID NO: 5078), VNGVQN (SEQ ID NO: 5079), VNSVQN (SEQ ID NO: 5080), VQAVQN (SEQ ID NO: 5081), VQNVQN (SEQ ID NO: 5082), VQPVQN (SEQ ID NO: 5083), VQQVQN (SEQ ID NO: 5084), VQSVQN (SEQ ID NO: 5085), VQTVQN (SEQ ID NO: 5086), VRPVQN (SEQ ID NO: 5087), VSAVQN (SEQ ID NO: 5088), VSGVQN (SEQ ID NO: 5089), VSNVQN (SEQ ID NO: 5090), VSPVQT (SEQ ID NO: 5091), VSQVQN (SEQ ID NO: 5092), VSRVQN (SEQ ID NO: 5093), VSSVQK (SEQ ID NO: 5094), VSSVQT (SEQ ID NO: 5095), VSTVQN (SEQ ID NO: 5096), VTAVQN (SEQ ID NO: 5097), VTGVQN (SEQ ID NO: 5098), VTKVQN (SEQ ID NO: 5099), VTPVQN (SEQ ID NO: 5100), VTSVQN (SEQ ID NO: 5101), TGLVQN (SEQ ID NO: 5102), TGWVKN (SEQ ID NO: 5103), PGWVQN (SEQ ID NO: 5104), TGWVQH (SEQ ID NO: 5105), LSGVQN (SEQ ID NO: 5106), LSSVQN (SEQ ID NO: 5107), LVPVQN (SEQ ID NO: 5108); an amino acid sequence comprising any portion of any of the aforesaid amino acid sequences (e.g., any 2, 3, 4, 5, or 6 amino acids, e.g., consecutive amino acids) thereof; an amino acid sequence comprising at least one, two, or three but no more than four modifications, e.g., substitutions (e.g., conservative substitutions), insertions, or deletions, relative to any of the aforesaid amino acid sequences; or an amino acid sequence comprising at least one, two, or three but no more than four different amino acids, relative to any one of the aforesaid amino acid sequences.

[1652] In some embodiments, [N1]-[N2]-[N3]-[N4]-[N5] comprises the amino acid sequence of any of SEQ ID NOs: 139-1138; an amino acid sequence comprising at least one, two, or three but no more than four modifications, e.g., substitutions (e.g., conservative substitutions), insertions, or deletions, relative to any of SEQ ID NOs: 139-1138; an amino acid sequence comprising at least one, two, or three but no more than four different amino acids, relative to any one of SEQ ID NOs: 139-1138. In some embodiments, [N1]-[N2]-[N3]-[N4]-[N5] comprises the amino acid sequence of any of SEQ ID NOs: 139-476; an amino acid sequence comprising at least one, two, or three but no more than four modifications, e.g., substitutions (e.g., conservative substitutions), insertions, or deletions, relative to any of SEQ ID NOs: 139-476; an amino acid sequence comprising at least one, two, or three but no more than four different amino acids, relative to any one of SEQ ID NOs: 139-476.

[1653] In some embodiments, [N2] is present immediately subsequent to [N1]. In some embodiments, the peptide comprises from N to C-terminus, [N1]-[N2]. In some embodiments, the peptide comprises from N to C-terminus, [N1]-[N2]-[N3]. In some embodiments, the peptide comprises from N to C-terminus, [N1]-[N2]-[N3]-[N4]. In some embodiments, the peptide comprises from N to C-terminus, [N1]-[N2]-[N3]-[N4]-[N5].

[1654] In some embodiments, the peptide comprises an amino acid sequence having the formula [A][B], wherein [A] comprises the amino acid sequence of PLNGA (SEQ ID NO: 3679), and [B] comprises X1, X2, X3, and X4. In some embodiments, position X1 of [B] is: V, I, L, A, F, D, or G. In some embodiments, position X2 of [B] is H, N, Q, P, D, L, R, or Y. In some embodiments, position X3 of [B] is L, H, I, R, or V. In some embodiments, position X4 of [B] is Y. In some embodiments, [B] comprises VH, VN, VQ, IH, LH, VP, VD, AH, FH, DH, VL, GH, VR, VY, LY, HY, IY, RY, HL, HH, HI, NL, QL, PL, DL, HR, LL, RL, HV, or YL. In some embodiments, B comprises VHL, VHH, VHI, VNL, VQL, IHL, LHL, VPL, VDL, AHL, VHR, FHL, DHL, VLL, GHL, VRL, VHV, VYL, HLY, HHY, HIY, NLY, QLY, PLY, DLY, HRY, LLY, RLY, HVY, or YLY. In some embodiments, [B] is or comprises VHLY (SEQ ID NO: 4680), VHHY (SEQ ID NO: 4683), VHIY (SEQ ID NO: 4681), VNLY (SEQ ID NO: 4724), VQLY (SEQ ID NO: 4729), IHLY (SEQ ID NO: 4730), LHLY (SEQ ID NO: 4727), VPLY (SEQ ID NO: 4723), VDLY (SEQ ID NO: 4731), AHLY (SEQ ID NO: 4732), VHRY (SEQ ID NO: 4725), FHLY (SEQ ID NO: 4726), DHLY (SEQ ID NO: 4728), VLLY (SEQ ID NO: 4733), GHLY (SEQ ID NO: 4734), VRLY (SEQ ID NO: 4735), VHVY (SEQ ID NO: 4682), or VYLY (SEQ ID NO: 4736). In some embodiments, [B] is or comprises VHLY (SEQ ID NO: 4680), VHHY (SEQ ID NO: 4683), or VHIY (SEQ ID NO: 4681). In some embodiments, [A][B] is or comprises PLNGAVHLY (SEQ ID NO: 3648), PLNGAVHHY (SEQ ID NO: 4796), PLNGAVHIY (SEQ ID NO: 4794), PLNGAVNLY (SEQ ID NO: 5123), PLNGAVQLY (SEQ ID NO: 5124), PLNGAIHLY (SEQ ID NO: 5125), PLNGALHLY (SEQ ID NO: 5126), PLNGAVPLY (SEQ ID NO: 5127), PLNGAVDLY (SEQ ID NO: 5128), PLNGAAHLY (SEQ ID NO: 5129), PLNGAVHRY (SEQ ID NO: 5130), PLNGAFHLY (SEQ ID NO: 5131), PLNGADHLY (SEQ ID NO: 5132), PLNGAVLLY (SEQ ID NO: 5133), PLNGAGHLY (SEQ ID NO: 5134), PLNGAVRLY (SEQ ID NO: 5135), PLNGAVHVY (SEQ ID NO: 5136), or PLNGAVYLY (SEQ ID NO: 5137); an amino acid sequence comprising any portion of any of the aforesaid amino acid sequences, e.g., any 2, 3, 4, 5, 6, 7, or 8 amino acids, e.g., consecutive amino acids, thereof; an amino acid sequence comprising at least one, two, or three but no more than four modifications, e.g., substitutions (e.g., conservative substitutions), insertions, or deletions, relative to any of the aforesaid amino acid sequences; or an amino acid sequence comprising at least one, two, or three but no more than four different amino acids, relative to any one of the amino aforesaid acid sequences.

[1655] In some embodiments, a peptide comprising an amino acid sequence comprising the formula [A][B], further comprises [C] which comprises X4, X5, X6, and X7. In some embodiments, position X4 of [C] is: A, D, S, or T. In some embodiments, position X5 of [C] is Q, K, H, L, P, or R. In some embodiments, position X6 of [C] is A, P, or E. In some embodiments, position X7 of [C] is Q, H, K, or P. In some embodiments [C] comprises AQ, AK, DQ, SQ, AH, AL, AP, AR, TQ, PQ, EQ, QA, QP, KA, HA, QE, LA, PA, or RA. In some embodiments [C] comprises AQA, AQP, AKA, DQA, SQA, AHA, AQE, ALA, APA, ARA, TQA, QAQ, QPQ, KAQ, HAQ, QEQ, QAK, LAQ, PAQ, RAQ, QAH, or QAP. In some embodiments [C] is or comprises AQAQ (SEQ ID NO: 4737), AQPQ (SEQ ID NO: 4739), AKAQ (SEQ ID NO: 4741), DQAQ (SEQ ID NO: 4744), SQAQ (SEQ ID NO: 4738), AHAQ (SEQ ID NO: 4742), AQEQ (SEQ ID NO: 4748), AQAK (SEQ ID NO: 4746), ALAQ (SEQ ID NO: 4749), APAQ (SEQ ID NO: 4745), ARAQ (SEQ ID NO: 4750), AQAH (SEQ ID NO: 4747), AQAP (SEQ ID NO: 4743), or TQAQ (SEQ ID NO: 4751). In some embodiments, [C] is or comprises AQAQ (SEQ ID NO: 4737), AQPQ (SEQ ID NO: 4739), AKAQ (SEQ ID NO: 4741), DQAQ (SEQ ID NO: 4744), or SQAQ (SEQ ID NO: 4738). In some embodiments [B][C] is or comprises VHLYAQAQ (SEQ ID NO: 4797), VHHYAQAQ (SEQ ID NO: 4804), VHLYAQPQ (SEQ ID NO: 4798), VHLYAKAQ (SEQ ID NO: 4800), VHLYDQAQ (SEQ ID NO: 4801), VHLYSQAQ (SEQ ID NO: 4799), VHIYAQAQ (SEQ ID NO: 4802), VHLYAHAQ (SEQ ID NO: 5138), VNLYAQAQ (SEQ ID NO: 5139), VQLYAQAQ (SEQ ID NO: 5140), VHLYAQEQ (SEQ ID NO: 5141), IHLYAQAQ (SEQ ID NO: 5142), LHLYAQAQ (SEQ ID NO: 5143), VPLYAQAQ (SEQ ID NO: 5144), VHLYAQAK (SEQ ID NO: 5145), VDLYAQAQ (SEQ ID NO: 5146), AHLYAQAQ (SEQ ID NO: 5147), VHRYAQAQ (SEQ ID NO: 5148), FHLYAQAQ (SEQ ID NO: 5149), VHLYALAQ (SEQ ID NO: 5150), DHLYAQAQ (SEQ ID NO: 5151), VHLYAPAQ (SEQ ID NO: 5152), VHLYARAQ (SEQ ID NO: 5153), VHLYAQAH (SEQ ID NO: 5154), VLLYAQAQ (SEQ ID NO: 5155), VHLYAQAP (SEQ ID NO: 5156), GHLYAQAQ (SEQ ID NO: 5157), VRLYAQAQ (SEQ ID NO: 5158), VHVYAQAQ (SEQ ID NO: 4803), VYLYAQAQ (SEQ ID NO: 5159), VHLYTQAQ (SEQ ID NO: 5160); an amino acid sequence comprising any portion of any of the aforesaid amino acid sequences, e.g., any 2, 3, 4, 5, 6, or 7 amino acids, e.g., consecutive amino acids, thereof; an amino acid sequence comprising at least one, two, or three but no more than four modifications, e.g., substitutions (e.g., conservative substitutions), insertions, or deletions, relative to any of the aforesaid amino acid sequences; or an amino acid sequence comprising at least one, two, or three but no more than four different amino acids, relative to any one of the aforesaid amino acid sequences. In some embodiments, [A][B][C][D] is or comprises PLNGAVHLYAQAQ (SEQ ID NO: 4836), PLNGAVHHYAQAQ (SEQ ID NO: 4850), PLNGAVHLYAQPQ (SEQ ID NO: 4837), PLNGAVHLYAKAQ (SEQ ID NO: 4835), PLNGAVHLYDQAQ (SEQ ID NO: 4838), PLNGAVHLYSQAQ (SEQ ID NO: 4839), PLNGAVHIYAQAQ (SEQ ID NO: 4848), PLNGAVHLYAHAQ (SEQ ID NO: 5181), PLNGAVNLYAQAQ (SEQ ID NO: 5182), PLNGAVQLYAQAQ (SEQ ID NO: 5183), PLNGAVHLYAQEQ (SEQ ID NO: 5184), PLNGAIHLYAQAQ (SEQ ID NO: 5185), PLNGALHLYAQAQ (SEQ ID NO: 5186), PLNGAVPLYAQAQ (SEQ ID NO: 5187), PLNGAVHLYAQAK (SEQ ID NO: 5188), PLNGAVDLYAQAQ (SEQ ID NO: 5189), PLNGAAHLYAQAQ (SEQ ID NO: 5190), PLNGAVHRYAQAQ (SEQ ID NO: 5191), PLNGAFHLYAQAQ (SEQ ID NO: 5192), PLNGAVHLYALAQ (SEQ ID NO: 5193), PLNGADHLYAQAQ (SEQ ID NO: 5194), PLNGAVHLYAPAQ (SEQ ID NO: 5195), PLNGAVHLYARAQ (SEQ ID NO: 5196), PLNGAVHLYAQAH (SEQ ID NO: 5197), PLNGAVLLYAQAQ (SEQ ID NO: 5198), PLNGAVHLYAQAP (SEQ ID NO: 5199), PLNGAGHLYAQAQ (SEQ ID NO: 5200), PLNGAVRLYAQAQ (SEQ ID NO: 5201), PLNGAVHVYAQAQ (SEQ ID NO: 5202), PLNGAVYLYAQAQ (SEQ ID NO: 5203), PLNGAVHLYTQAQ (SEQ ID NO: 5204); an amino acid sequence comprising any portion of any of the aforesaid amino acid sequences, e.g., any 2, 3, 4, 5, 6, 7, 8, 9, 10, 11, or 12 amino acids, e.g., consecutive amino acids, thereof; an amino acid sequence comprising at least one, two, or three but no more than four modifications, e.g., substitutions (e.g., conservative substitutions), insertions, or deletions, relative to any of the aforesaid amino acid sequences; or an amino acid sequence comprising at least one, two, or three but no more than four different amino acids, relative to any one of the aforesaid amino acid sequences.

[1656] In some embodiments, the peptide comprising an amino acid sequence comprising the formula [A][B], further comprises [D], which comprises X8, X9, and X10. In some embodiments, position X8 of [D] is: T, V, S, L, R, I, A, N, C, Q, M, P, or K. In some embodiments, position X9 of [D] is: T, M, A, G, K, S, Q, V, I, R, N, P, L, H, or Y. In some embodiments, position X10 of [D] is: K, Q, W, S, P, C, A, G, N, T, R, V, M, H, L, E, F, or Y. In some embodiments, [D] comprises TT, TM, VA, TA, TG, VK, SA, LS, LA, TQ, TV, RI, RA, LT, ST, TS, VS, VT, RQ, IS, VR, LG, TN, VQ, AA, RS, IQ, IA, RG, NS, LQ, VM, SM, VG, CS, TP, SS, AG, TL, LN, TK, CT, AS, LK, LM, LH, RT, RM, VH, TR, SG, VL, QA, NA, AT, NT, RL, IT, IG, RN, NM, NV, MA, IL, VN, SV, RV, PG, QS, RY, SQ, NQ, LL, LP, AQ, TY, NL, SP, LV, KG, VP, AV, KS, AM, SL, AL, RP, IP, MK, AW, GS, KQ, AP, SK, AK, GC, QK, MQ, QP, GP, QQ, AN, GK, QR, PP, AR, GG, MS, NP, KP, MN, KA, SN, MP, HP, GN, RW, MT, SR, GW, QH, GL, QM, VW, MG, AH, QT, GR, SH, GQ, GT, GA, NG, QN, VE, MM, QL, QG, YS, GM, LR, AF, PQ, SW, QW, YA, ML, GF, PA, PS, PT, GY, GV, PW, PR. In some embodiments, [D] is or comprises TTK, TMK, VAQ, TAW, TGS, VKQ, SAP, LSK, LAP, LAQ, TAK, SAK, TGC, TQK, TVA, LSP, TTQ, TAQ, RIA, RAS, TTP, LTP, STP, TSP, TMQ, TSK, VSQ, VSP, TVQ, VTA, RQP, ISG, VRP, LGP, TNQ, VQQ, VAN, AAP, RST, TMA, IQP, IAS, TVS, RGS, NSP, LQP, VTG, VMQ, SMA, VGK, IQS, CSP, LQR, TPP, VTK, SSP, AGP, LAR, TTT, TGG, TLQ, TMS, VAK, RAA, TVG, LNP, LSQ, TKP, TNA, LAT, VTP, VQA, TTS, CTP, TAG, TSQ, TMN, TST, VKP, ASP, VAA, LKS, IAA, TAA, TKA, VSN, TAP, LMP, LHP, RAQ, LTN, RTT, TSV, RMS, VGN, LMQ, TAT, VHP, ISS, VAS, TRW, TMT, RSS, RTG, VAT, VTS, VSS, TNS, VKA, SGP, TGP, TAM, TQP, TQQ, VSR, TGW, VSA, VLS, TQH, LAS, QAP, NAQ, ATP, VQP, TTA, LAA, RSG, LMA, TMP, LAN, VST, SAQ, NTP, TGL, TAV, RLG, RTL, TQM, ITP, TVW, RSA, TAS, TMG, VQS, ISP, VGG, TAL, LAG, RTA, RSP, TLA, LAH, TSL, RLS, LMG, SMQ, TQT, VGS, VSG, VMA, IGG, IAG, TGR, LSH, VQT, RNS, TLP, TKQ, LGQ, NMQ, NVQ, RGG, VMS, TTG, LSR, MAP, ILG, TGT, TSS, TSH, RIG, SAM, TSM, SMG, SMS, TSG, TGA, VNS, VAG, IGS, LGS, VNG, LTA, VQN, TKS, SVG, NAS, TSA, TAN, LTS, RSQ, RIP, RVE, VLP, SVA, LQQ, LST, SAA, RTS, TQN, VNA, LMS, TMM, RSV, TQL, RTP, RQQ, VQG, PGW, STQ, QSP, RYS, TQR, SAG, RQS, SQP, STS, VLG, NQP, LGT, RAG, TGM, LSN, RLP, RQG, RLT, TLR, SAF, SVQ, LLP, RTQ, LPP, AQP, TPQ, TSW, NTT, TTR, TQW, NTQ, TYA, TLS, NLP, ATS, ATQ, LSS, TQA, VMP, NAL, RML, RQL, TLG, TGF, SAL, SQL, LSA, TGQ, TNG, AAA, SAV, LSG, SSR, SPP, LVG, TPA, KGW, VPP, ATG, SAN, SQQ, SSM, AVG, VAP, TPS, RGW, SSL, TYS, TPT, IGW, KSS, TGY, RSL, SVS, TSN, SQM, VPA, AMS, TPG, TGV, VPQ, SLP, ALP, TPW, TPR, SSS, RPP, IPP, AGW, or RPG.

[1657] In some embodiments, the peptide comprising the amino acid sequence comprising the formula [A][B], further comprises [E], which comprises X11, X12, and X13. In some embodiments, X1I of [E] is: V, D, F, A, E, L, G, or I. In some embodiments, X12 of [E] is Q, R, P, K, L, H, or E. In some embodiments, X13 of [E] is: N, H, S, T, P, K, I, D, or Y. In some embodiments, [E] comprises VQ, DQ, FQ, VR, VP, VK, AQ, EQ, LQ, GQ, VL, VH, VE, DK, GH, IQ, QN, QH, QS, QT, QP, RN, PN, KN, QK, QI, LN, QD, HN, KT, KK, EN, QY, or PH. In some embodiments, [E] is or comprises VQN, DQN, VQH, FQN, VQS, VQT, VQP, VRN, VPN, VKN, AQN, VQK, EQN, VQI, LQN, GQT, VLN, VQD, VHN, GQN, VKT, VKK, FQK, VEN, VQY, DKN, GHN, IQN, or VPH.

[1658] In some embodiments, [A][B][C][D][E] comprises the amino acid sequence of any of SEQ ID NOs: 143, 148, 149, 151, 153, 154-158, 160-163, 166, 168, 170, 171, 173-175, 177-179, 181, 182, 184-188, 191-197, 199-210, 212-215, 217-225, 227-231, 233, 234, 236-240, 243-262, 265, 267, 268, 270-277, 279, 282, 284-286, 288-293, 295, 296, 298, 300-314, 316-327, 329, 331, 332, 334, 336, 337-344, 346-350, 352-354, 356-365, 367, 369, 371-380, 382-385, 387, 392-394, 396, 397, 399-401, 404-411, 413-415, 417, 419-429, 432, 433, 435-437, 438, 440-442, 444-447, 450-454, 456, 458-461, 464, 465, 467-469, 471-484, 487-495, 497, 498, 500-503, 505, 507-512, 514-517, 522-525, 528-539, 542-545, 547, 551-555, 558-561, 563-568, 570, 573, 574, 576, 579, 581, 582, 584, 586, 587, 591-596, 598, 601, 604, 605, 606, 607, 610, 612, 614-619, 624-629, 631-636, 640, 641, 645, 646, 649, 650, 656, 658, 661, 663, 664, 666, 668, 669, 670, 672, 673, 674, 675, 677, 679, 683, 684, 686, 688, 689, 691, 693, 695, 696, 697, 699, 700, 701, 702, 704-706, 709-714, 720, 722, 725-731, 733, 736, 740, 745, 749-752, 754, 755, 757, 758, 760-765, 767, 768, 770, 771, 773, 778-780, 783-788, 792-794, 797-799, 801, 802, 804-806, 812, 814, 815, 817, 818, 820, 821, 824, 828, 831, 832, 834-837, 839, 840-845, 847, 848, 850-855, 857-859, 861, 862, 865, 866, 869-872, 874-876, 882-884, 887, 889-895, 897, 899, 901, 903-905, 907, 908, 910, 911, 913, 915, 919, 920, 923, 924, 926, 927, 929, 931-933, 935, 937, 939-949, 952-955, 957, 958, 960, 962, 964, 965, 967, 971, 973, 974, 976, 977, 981, 985-989, 992, 994, 997-1000, 1002, 1004, 1006-1008, 1010, 1013, 1015, 1017, 1018, 1020, 1021, 1023-1025, 1027, 1029-1031, 1033-1035, 1037-1040, 1043, 1046, 1049, 1052, 1053, 1056, 1057, 1059, 1062, 1064, 1065, 1067, 1068, 1070, 1073, 1075, 1077-1080, 1083-1087, 1089, 1090, 1093, 1094, 1097, 1100, 1101, 1103, 1105-1107, 1110-1112, 1114-1117, 1119, 1121, 1125, 1126, 1129, 1132, 1133, or 1135; an amino acid sequence comprising any portion of any of the aforesaid amino acid sequences; an amino acid sequence comprising at least one, two, or three but no more than four modifications, e.g., substitutions (e.g., conservative substitutions), insertions, or deletions, relative to any of the aforesaid amino acid sequences; an amino acid sequence comprising at least one, two, or three but no more than four different amino acids, relative to any one of the aforesaid amino acid sequences.

[1659] In some embodiments, [B] is present immediately subsequent to [A]. In some embodiments, the peptide comprises from N-terminus to C-terminus [A][B]. In some embodiments, the peptide comprises from N-terminus to C-terminus [A][B][C]. In some embodiments, the peptide comprises from N-terminus to C-terminus [A][B][C][D]. In some embodiments, the peptide comprises from N-terminus to C-terminus [A][B][C][D][E].

[1660] In some embodiments, the peptide comprises at least 3, 4, 5, 6, 7, 8, 9, 10, 11, 12, 13, 14, 15, 16, 17, or 18 consecutive amino acids from any one of SEQ ID NOs: 139-1138.

[1661] In some embodiments, the peptide comprises at least 3, 4, 5, 6, 7, 8, 9, 10, 11, 12, 13, 14, 15, 16, 17, or 18 consecutive amino acids from any one of SEQ ID NOs: 139-476.

[1662] In some embodiments, the peptide comprises at least 3, 4, 5, 6, 7, 8, 9, 10, 11, 12, 13, 14, 15, 16, 17, or 18 consecutive amino acids from any one of the amino acid sequences provided in Table 1B.

[1663] In some embodiments, the peptide comprises at least 3, 4, 5, 6, 7, 8, 9, 10, 11, 12, 13, 14, 15, 16, 17, or 18 consecutive amino acids from any one of the amino acid sequences provided in Table 11.

[1664] In some embodiments, the peptide comprises at least 3, 4, 5, 6, 7, 8, 9, 10, 11, 12, 13, 14, 15, 16, 17, or 18 consecutive amino acids from any one of the amino acid sequences provided in Table 20.

[1665] In some embodiments, the peptide comprises at least 3, 4, 5, 6, 7, 8, or 9 consecutive amino acids from the amino acid sequence of any of SEQ ID NO: 1725-3622. In some embodiments, the peptide comprises at least 3, 4, 5, 6, 7, 8, or 9 consecutive amino acids from the amino acid sequence of any of SEQ ID NO: 3648-3659.

[1666] In some embodiments, the 3 consecutive amino acids comprise PLN. In some embodiments, the 4 consecutive amino acids comprise PLNG (SEQ ID NO: 3678). In some embodiments, the 5 consecutive amino acids comprise PLNGA (SEQ ID NO: 3679). In some embodiments, the 6 consecutive amino acids comprise PLNGAV (SEQ ID NO: 3680). In some embodiments, the 7 consecutive amino acids comprise PLNGAVH (SEQ ID NO: 3681). In some embodiments, the 8 consecutive amino acids comprise PLNGAVHL (SEQ ID NO: 3682). In some embodiments, the 9 consecutive amino acids comprise PLNGAVHLY (SEQ ID NO: 3648).

[1667] In some embodiments, the four consecutive amino acids comprise NGAV (SEQ ID NO: 3683). In some embodiments, the four consecutive amino acids comprise GAVH (SEQ ID NO: 3684). In some embodiments, the five consecutive amino acids comprise NGAVH (SEQ ID NO: 3685). In some embodiments, the five consecutive amino acids comprise GAVHL (SEQ ID NO: 3686). In some embodiments, the five consecutive amino acids comprise AVHLY (SEQ ID NO: 3687). In some embodiments, the six consecutive amino acids comprise NGAVHL (SEQ ID NO: 3688). In some embodiments, the seven consecutive amino acids comprise NGAVHLY (SEQ ID NO: 3689).

[1668] In some embodiments, the 3 consecutive amino acids comprise YST. In some embodiments, the 4 consecutive amino acids comprise YSTD (SEQ ID NO: 3690). In some embodiments, the 5 consecutive amino acids comprise YSTDE (SEQ ID NO: 3691). In some embodiments, the 5 consecutive amino acids comprise YSTDV (SEQ ID NO: 3700). In some embodiments, the 6 consecutive amino acids comprise YSTDER (SEQ ID NO: 3692). In some embodiments, the 6 consecutive amino acids comprise YSTDVR (SEQ ID NO: 3701). In some embodiments, the 7 consecutive amino acids comprise YSTDERM (SEQ ID NO: 3657). In some embodiments, the 7 consecutive amino acids comprise YSTDERK (SEQ ID NO: 3658). In some embodiments, the 7 consecutive amino acids comprise YSTDVRM (SEQ ID NO: 3650).

[1669] In some embodiments, the 3 consecutive amino acids comprise IVM. In some embodiments, the 4 consecutive amino acids comprise IVMN (SEQ ID NO: 3693). In some embodiments, the 5 consecutive amino acids comprise IVMNS (SEQ ID NO: 3694). In some embodiments, the 6 consecutive amino acids comprise IVMNSL (SEQ ID NO: 3695). In some embodiments, the 7 consecutive amino acids comprise IVMNSLK (SEQ ID NO: 3651).

[1670] In some embodiments, the peptide comprises an amino sequence comprising at least one, two, or three but no more than four modifications, e.g., substitutions (e.g., conservative substitutions), insertions, or deletions, relative to the amino acid sequence of any one of SEQ ID NOs: 139-1138. In some embodiments, the peptide comprises an amino sequence comprising at least one, two, or three but no more than four different amino acids, relative to the amino acid sequence of any one of SEQ ID NOs: 139-1138.

[1671] In some embodiments, the peptide comprises an amino sequence comprising at least one, two, or three but no more than four modifications, e.g., substitutions (e.g., conservative substitutions), insertions, or deletions, relative to the amino acid sequence of any one of SEQ ID NOs: 139-476. In some embodiments, the peptide comprises an amino sequence comprising at least one, two, or three but no more than four different amino acids, relative to the amino acid sequence of any one of SEQ ID NOs: 139-476.

[1672] In some embodiments, the peptide comprises an amino sequence comprising at least one, two, or three but no more than four modifications, e.g., substitutions (e.g., conservative substitutions), insertions, or deletions, relative to any one of the amino acid sequences in Table 1B. In some embodiments, the peptide comprises an amino sequence comprising at least one, two, or three but no more than four different amino acids, relative to any one of the amino acid sequences in Table 1B.

[1673] In some embodiments, the peptide comprises an amino sequence comprising at least one, two, or three but no more than four modifications, e.g., substitutions (e.g., conservative substitutions), insertions, or deletions, relative to the amino acid sequence of any one of SEQ ID NOs: 1139-1172. In some embodiments, the peptide comprises an amino sequence comprising at least one, two, or three but no more than four different amino acids, relative to the amino acid sequence of any one of SEQ ID NOs: 1139-1172.

[1674] In some embodiments, the peptide comprises an amino acid sequence comprising at least one, two, or three but no more than four modifications, e.g., substitutions (e.g., conservative substitutions), insertions, or deletions, relative to the amino acid sequence of any of SEQ ID NO: 1725-3622. In some embodiments, the peptide comprises an amino sequence comprising at least one, two, or three but no more than four different amino acids, relative to the amino acid sequence of any one of SEQ ID NOs: 1725-3622.

[1675] In some embodiments, the peptide comprises an amino acid sequence comprising at least one, two, or three but no more than four modifications, e.g., substitutions (conservative substitutions), insertions, or deletions, relative to the amino acid sequence of any of SEQ ID NO: 3648-3659. In some embodiments, the peptide comprises an amino sequence comprising at least one, two, or three but no more than four different amino acids, relative to the amino acid sequence of any one of SEQ ID NOs: 3648-3659.

[1676] In some embodiments, the peptide comprises the amino acid sequence of PLNGAVHLY (SEQ ID NO: 3648); an amino acid sequence comprising at least one, two, or three but no more than four modifications, e.g., substitutions (conservative substitutions), insertions, or deletions, relative to the amino acid sequence of PLNGAVHLY (SEQ ID NO: 3648); or an amino acid sequence comprising at least one, two, or three but no more than four different amino acids relative to the amino acid sequence of PLNGAVHLY (SEQ ID NO: 3648), optionally wherein position 7 is H.

[1677] In some embodiments, the peptide comprises the amino acid sequence of RDSPKGW (SEQ ID NO: 3649), or an amino acid sequence comprising at least one, two, or three modifications but no more than four modifications, e.g., substitutions (conservative substitutions), insertions, or deletions, relative to the amino acid sequence of RDSPKGW (SEQ ID NO: 3649); or an amino acid sequence comprising at least one, two, or three but no more than four different amino acids relative to the amino acid sequence of RDSPKGW (SEQ ID NO: 3649).

[1678] In some embodiments, the peptide comprises the amino acid sequence of IVMNSLK (SEQ ID NO: 3651), or an amino acid sequence comprising at least one, two, or three modifications but no more than four modifications, e.g., substitutions (conservative substitutions), insertions, or deletions, relative to the amino acid sequence of IVMNSLK (SEQ ID NO: 3651); or an amino acid sequence comprising at least one, two, or three but no more than four different amino acids relative to the amino acid sequence of IVMNSLK (SEQ ID NO: 3651).

[1679] In some embodiments, the peptide comprises the amino acid sequence of YSTDVRM (SEQ ID NO: 3650), or an amino acid sequence comprising at least one, two, or three modifications but no more than four modifications, e.g., substitutions (conservative substitutions), insertions, or deletions, relative to the amino acid sequence of YSTDVRM (SEQ ID NO: 3650); or an amino acid sequence comprising at least one, two, or three but no more than four different amino acids relative to the amino acid sequence of YSTDVRM (SEQ ID NO: 3650).

[1680] In some embodiments, the peptide comprises the amino acid sequence of RESPRGL (SEQ ID NO: 3652), or a sequence comprising at least one, two, or three modifications but no more than four modifications, e.g., substitutions (conservative substitutions), insertions, or deletions, relative to the amino acid sequence of RESPRGL (SEQ ID NO: 3652); or an amino acid sequence comprising at least one, two, or three but no more than four different amino acids relative to the amino acid sequence of RESPRGL (SEQ ID NO: 3652).

[1681] In some embodiments, the peptide comprises the amino acid sequence of any of SEQ ID NOs: 139-1138. In some embodiments, the peptide comprises the amino acid sequence of any of SEQ ID NOs: 139-476. In some embodiments, the peptide comprises the amino acid sequence of any one of the amino acid sequences provided in Table 1B. In some embodiments, the peptide comprises the amino acid sequence of any of SEQ ID NOs: 1139-1172.

[1682] In some embodiments, the peptide comprises the amino acid sequence of any of SEQ ID NO: 1725-3622. In some embodiments, the peptide comprises the amino acid sequence of any of SEQ ID NO: 3648-3659.

[1683] In some embodiments, the peptide may comprise an amino acid sequence with 50%, 51%, 52%, 53%, 54%, 55%, 56%, 57%, 58%, 59%, 60%, 61%, 62%, 63%, 64%, 65%, 66%, 67%, 68%, 69%, 70%, 71%, 72%, 73%, 74%, 75%, 76%, 77%, 78%, 79%, 80%, 81%, 82%, 83%, 84%, 85%, 86%, 87%, 88%, 89%, 90%, 91%, 92%, 93%, 94%, 95%, 96%, 97%, 98%, 99%, or 100% identity to any of the sequences shown in Table 1A, Table 1B, Table 2, Table 7, Table 10, Table 11, or Table 20.

[1684] In some embodiments, the peptide comprises the amino acid sequence of SEQ ID NO: 3648. In some embodiments, the peptide comprises the amino acid sequence of SEQ ID NO: 3649. In some embodiments, the peptide comprises the amino acid sequence of SEQ ID NO: 3650. In some embodiments, the peptide comprises the amino acid sequence of SEQ ID NO: 3651. In some embodiments, the peptide comprises the amino acid sequence of SEQ ID NO: 3652. In some embodiments, the peptide comprises the amino acid sequence of SEQ ID NO: 3653. In some embodiments, the peptide comprises the amino acid sequence of SEQ ID NO: 3654. In some embodiments, the peptide comprises the amino acid sequence of SEQ ID NO: 3655. In some embodiments, the peptide comprises the amino acid sequence of SEQ ID NO: 3656. In some embodiments, the peptide comprises the amino acid sequence of SEQ ID NO: 3657. In some embodiments, the peptide comprises the amino acid sequence of SEQ ID NO: 3658. In some embodiments, the peptide comprises the amino acid sequence of SEQ ID NO: 3659.

[1685] In some embodiments, the peptide may comprise SEQ ID NO: 1725. In some embodiments, the peptide may comprise SEQ ID NO: 1726. In some embodiments, the peptide may comprise SEQ ID NO: 1729. In some embodiments, the peptide may comprise SEQ ID NO: 1760. In some embodiments, the peptide may comprise SEQ ID NO: 1769. In some embodiments, the peptide may comprise SEQ ID NO: 3622. In some embodiments, the peptide may comprise SEQ ID NO: 1798. In some embodiments, the peptide may comprise SEQ ID NO: 1785. In some embodiments, the peptide may comprise SEQ ID NO: 1767. In some embodiments, the peptide may comprise SEQ ID NO: 1734. In some embodiments, the peptide may comprise SEQ ID NO: 1737. In some embodiments, the peptide may comprise SEQ ID NO: 1819.

[1686] In some embodiments, the peptide comprises an amino acid sequence encoded by a nucleotide sequence described herein, e.g., a nucleotide sequence of Table 2. In some embodiments, the peptide comprises an amino acid sequence encoded by a nucleotide sequence comprising at least one, two, three, four, five, six, or seven modifications, e.g., substitutions (e.g., conservative substitutions), insertions, or deletions, but no more than ten modifications, e.g., substitutions (e.g., conservative substitutions), insertions, or deletions, relative to the nucleotide sequences of any of SEQ ID NOs: 3660-3671. In some embodiments, the peptide comprises an amino acid sequence encoded by a nucleotide sequence comprising at least one, two, three, four, five, six, or seven, but no more than ten different nucleotides relative to the nucleotide sequence of any of SEQ ID NOs: 3660-3671. In some embodiments, the peptide comprises an amino acid sequence encoded by the nucleotide sequence of any one of SEQ ID NOs: 3660-3671, or a nucleotide sequence substantially identical (e.g., having at least 70%, 75%, 80%, 85%, 90%, 92%, 95%, 97%, 98%, or 99% sequence identity) thereto.

[1687] In some embodiments, the peptide comprises an amino acid sequence encoded by a nucleotide sequence comprising at least one, two, three, four, five, six, or seven modifications, e.g., substitutions (e.g., conservative substitutions), insertions, or deletions, but no more than ten modifications, e.g., substitutions (e.g., conservative substitutions), insertions, or deletions, relative to the nucleotide sequence of SEQ ID NO: 3660. In some embodiments, the peptide comprises an amino acid sequence encoded by a nucleotide sequence comprising at least one, two, three, four, five, six, or seven, but no more than ten different nucleotides relative to the nucleotide sequence of SEQ ID NO: 3660. In some embodiments, the peptide comprises an amino acid sequence encoded by the nucleotide sequence of SEQ ID NO: 3660, or a nucleotide sequence substantially identical (e.g., having at least 70%, 75%, 80%, 85%, 90%, 92%, 95%, 97%, 98%, or 99% sequence identity) thereto.

[1688] In some embodiments, the peptide comprises an amino acid sequence encoded by a nucleotide sequence comprising at least one, two, three, four, five, six, or seven modifications, e.g., substitutions (e.g., conservative substitutions), insertions, or deletions, but no more than ten modifications, e.g., substitutions (e.g., conservative substitutions), insertions, or deletions, relative to the nucleotide sequence of SEQ ID NO: 3663. In some embodiments, the peptide comprises an amino acid sequence encoded by a nucleotide sequence comprising at least one, two, three, four, five, six, or seven, but no more than ten different nucleotides relative to the nucleotide sequence of SEQ ID NO: 3663. In some embodiments, the peptide comprises an amino acid sequence encoded by the nucleotide sequence of SEQ ID NO: 3663, or a nucleotide sequence substantially identical (e.g., having at least 70%, 75%, 80%, 85%, 90%, 92%, 95%, 97%, 98%, or 99% sequence identity) thereto.

[1689] In some embodiments, the nucleotide sequence encoding a peptide described herein e.g., peptide 1-12, comprises a nucleotide sequence described herein, e.g., as described in Table 2. In some embodiments, the nucleic acid sequence encoding a peptide described herein comprises the nucleotide sequence of any of SEQ ID NOs: 3660-3671, or a nucleotide sequence substantially identical (e.g., having at least 70%, 75%, 80%, 85%, 90%, 92%, 95%, 97%, 98%, or 99% sequence identity) thereto. In some embodiments, the nucleic acid sequence encoding a peptide described herein comprises a nucleotide sequence comprising at least one, two, three, four, five, six, or seven modifications, e.g., substitutions (e.g., conservative substitutions), insertions, or deletions, but no more than ten modifications, e.g., substitutions (e.g., conservative substitutions), insertions, or deletions, relative to the nucleotide sequences of any of SEQ ID NOs: 3660-3671. In some embodiments, the nucleotide sequence encoding the peptide comprises a nucleotide sequence comprising at least one, two, three, four, five, six, or seven, but no more than ten different nucleotides relative to the nucleotide sequence of any of SEQ ID NOs: 3660-367. In some embodiments, the nucleotide sequence encoding a peptide described herein is isolated, e.g., recombinant.

[1690] In some embodiments the nucleotide sequence encoding a peptide described herein comprises a nucleotide sequence comprising at least one, two, three, four, five, six, or seven modifications, e.g., substitutions (e.g., conservative substitutions), insertions, or deletions, but no more than ten modifications, e.g., substitutions (e.g., conservative substitutions), insertions, or deletions, relative to the nucleotide sequence of SEQ ID NO: 3660. In some embodiments, the nucleotide sequence encoding the peptide comprises a nucleotide sequence comprising at least one, two, three, four, five, six, or seven, but no more than ten different nucleotides relative to the nucleotide sequence of SEQ ID NO: 3660. In some embodiments the nucleic acid sequence encoding a peptide described herein comprises a nucleotide sequence comprising the nucleotide sequence of SEQ ID NO: 3660, or a nucleotide sequence substantially identical (e.g., having at least 70%, 75%, 80%, 85%, 90%, 92%, 95%, 97%, 98%, or 99% sequence identity) thereto.

[1691] In some embodiments, the nucleic acid encoding a peptide described herein comprises a nucleotide sequence comprising at least one, two, three, four, five, six, or seven modifications, e.g., substitutions (e.g., conservative substitutions), insertions, or deletions, but no more than ten modifications, e.g., substitutions (e.g., conservative substitutions), insertions, or deletions, relative to the nucleotide sequence of SEQ ID NO: 3663. In some embodiments, the nucleotide sequence encoding the peptide comprises a nucleotide sequence comprising at least one, two, three, four, five, six, or seven, but no more than ten different nucleotides relative to the nucleotide sequence of SEQ ID NO: 3663. In some embodiments the nucleic acid encoding a peptide described herein comprises a nucleotide sequence comprising the nucleotide sequence of SEQ ID NO: 3663, or a nucleotide sequence substantially identical (e.g., having at least 70%, 75%, 80%, 85%, 90%, 92%, 95%, 97%, 98%, or 99% sequence identity) thereto.

[1692] In some embodiments, a peptide described herein is fused or coupled, e.g., conjugated, to an active agent. In some embodiments, the active agent is a therapeutic agent. In some embodiments, the agent is a therapeutic agent. In some embodiments, the active agent comprises a therapeutic protein, an antibody molecule, an enzyme, one or more components of a genome editing system, an Fc polypeptide fused or coupled (e.g., covalently or non covalently) to a therapeutic agent, and/or an RNAi agent (e.g., a dsRNA, antisense oligonucleotide (ASO), siRNA, shRNA, pre-miRNA, pri-miRNA, miRNA, stRNA, lncRNA, piRNA, or snoRNA). In some embodiments, the therapeutic agent is an antibody. In some embodiments, the peptide is fused or coupled, e.g., conjugated (e.g., directly or indirectly) to the Fc region of the antibody, e.g., at the C-terminus of the Fc region or the N-terminus of the Fc region. In some embodiments, the therapeutic agent is an RNAi agent. In some embodiments, the RNAi agent is a siRNA or an ASO. In some embodiments, the ASO or siRNA comprises at least one (e.g., one or more or all) modified nucleotides. In some embodiments, the peptide is fused or coupled, e.g., conjugated (e.g., directly or indirectly via a linker), to at least one strand of the RNAi agent. In some embodiments, the peptide is conjugated, e.g., directly or indirectly via a linker, to the C-terminus of at least one strand of the RNAi agent. In some embodiments, the peptide is conjugated, e.g., directly or indirectly via a linker, to an internal nucleotide of at least one strand of the RNAi agent. In some embodiments, the at least one strand is the sense strand. In some embodiments, the therapeutic agent modulates, e.g., inhibits, decreases, or increases, expression of, a CNS related gene, mRNA, and/or protein.

[1693] In some embodiments, the active agent is a diagnostic agent. In some embodiments, the diagnostic agent is or comprises an imaging agent (e.g., a protein or small molecule compound coupled to a detectable moiety). In some embodiments, the imaging agent comprises a PET or MRI ligand, or an antibody molecule coupled to a detectable moiety. In some embodiments, the detectable moiety is or comprises a radiolabel, a fluorophore, a chromophore, or an affinity tag. In some embodiments, the radiolabel is or comprises tc99m, iodine-123, a spin label, iodine-131, indium-111, fluorine-19, carbon-13, nitrogen-15, oxygen-17, gadolinium, manganese, or iron. In some embodiments, the active agent is a small molecule. In some embodiments, the active agent is a ribonucleic acid complex (e.g., a Cas9/gRNA complex), a plasmid, a closed-end DNA, a circ-RNA, or an mRNA.

[1694] In some embodiments, at least 1-5, e.g., at least 1, 2, 3, 4, or 5, peptides are fused or coupled, e.g., conjugated, to an active agent, e.g., a therapeutic agent or a diagnostic agent. In some embodiments, the at least 1-5, e.g., at least 1, 2, 3, 4, or 5, peptides comprise the same amino acid sequence. In some embodiments, the at least 1-5, e.g., at least 1, 2, 3, 4, or 5, peptides comprise different amino acid sequences. In some embodiments, the at least 1-5, e.g., at least 1, 2, 3, 4, or 5, peptides are present in tandem (e.g., connected directly or indirectly via a linker) or in a multimeric configuration. In some embodiments, the peptide comprises an amino acid sequence of at least 3, 4, 5, 6, 7, 8, 9, 10, 11, 12, 15, 20, 25, 30, or 35 amino acids in length.

[1695] In some embodiments, the peptide covalently linked, e.g., directly or indirectly via a linker, to the active agent. In some embodiments, the peptide is conjugated to the active agent via a linker. In some embodiments, the linker is a cleavable linker or a non-cleavable linker. In some embodiments, the cleavable linker is a pH sensitive linker or an enzyme sensitive linker. In some embodiments, the pH sensitive linker comprises a hydrazine/hydrazone linker or a disulfide linker. In some embodiments, the enzyme sensitive linker comprises a peptide based linker, e.g., a peptide linker sensitive to a protease (e.g., a lysosomal protease); or a beta-glucuronide linker. In some embodiments, the non-cleavable linker is a linker comprising a thioether group or a maleimidocaproyl group. In some embodiments, the peptide and the active agent are fused or coupled post-translationally, e.g., using click chemistry. In some embodiments, the peptide and the active agent are fused or couple via chemically induced dimerization. In some embodiments, the peptide is present N-terminal relative to the active agent. In some embodiments, the peptide is present C-terminal relative to the active agent.

[1696] In some embodiments, the peptide is present or coupled to a carrier. In some embodiments, the carrier comprises an exosome, a microvesicle, or a lipid nanoparticle (LNP). In some embodiments, the carrier comprises a therapeutic agent (e.g., an RNAi agent (e.g., an dsRNA, a siRNA, a shRNA, a pre-miRNA, a pri-miRNA, a miRNA, a stRNA, a lncRNA, a piRNA, an antisense oligonucleotide agent (ASO), or a snoRNA), an mRNA, a ribonucleoprotein complex (e.g., a Cas9/gRNA complex), or a circRNA). In some embodiments, the peptide is present on the surface of the carrier. In some embodiments, at least 10%, 20%, 30%, 40%, 50%, 60%, 70%, or 80% of the surface of the carrier comprises at least 1-5, e.g., at least 1, 2, 3, 4, or 5 peptides described herein.

[1697] The present disclosure also provides a nucleic acid or polynucleotide encoding any of the peptides described herein, and AAV capsid polypeptides, e.g., AAV capsid variants, AAV particles, vectors, cells, and formulations, e.g., pharmaceutical formulations, comprising the same.

### AAV Capsid Polypeptide, e.g., AAV Capsid Variant

[1698] In some embodiments, an AAV particle described herein comprises an AAV capsid polypeptide, e.g., an AAV capsid polypeptide, e.g., an AAV capsid variant. In some embodiments, the AAV capsid variant comprises a peptide, sequence as described in Table 1A, 1B, 2, 7, 10, 11, or 20.

[1699] In some embodiments, the AAV capsid polypeptide, e.g., the AAV capsid variant, comprises an amino acid sequence comprising the following formula [N1]-[N2], wherein [N1] comprises X1, X2, X3, X4, and X5, and [N2] comprises the amino acid sequence of VHLY (SEQ ID NO: 4680), VHIY (SEQ ID NO: 4681), VHVY (SEQ ID NO: 4682), or VHHY (SEQ ID NO: 4683). In some embodiments, position X1 of [N1] is: P, Q, A, H, K, L, R, S, or T. In some embodiments, position X2 of [N1] is: L, I, V, H, or R. In some embodiments, position X3 of [N1] is: N, D, I, K, or Y. In some embodiments, position X4 of [N1] is: G, A, C, R, or S. In some embodiments, position X5 of [N1] is: A, S, T, G, C, D, N, Q, V, or Y. In some embodiments [N1] comprises AL, PI, PL, QL, SL, TL, LN, LD, IN, NG, DG, DS, GA, SA, SS, GG, GN, GS, or GT. In some embodiments, [N1] comprises ALD, ALN, PIN, PLD, PLN, QLN, SLD, SLN, TLN, LNG, LDG, ING, LDS, NGA, DGA, DSA, DSS, NGG, NGN, NGS, NGT. In some embodiments, [N1] is or comprises SLNGA (SEQ ID NO: 4684), QLNGA (SEQ ID NO: 4685), ALNGA (SEQ ID NO: 4686), PLNGS (SEQ ID NO: 4687), PVNGA (SEQ ID NO: 4688), PLNGA (SEQ ID NO: 3679), PLNGG (SEQ ID NO: 4689), PLNGT (SEQ ID NO: 4690), PLDGA (SEQ ID NO: 4691), QLNGS (SEQ ID NO: 4692), PLNGN (SEQ ID NO: 4693), SLDGA (SEQ ID NO: 4694), HLNGA (SEQ ID NO: 4695), ALNGT (SEQ ID NO: 4696), PINGA (SEQ ID NO: 4697), ALDGA (SEQ ID NO: 4698), PLNCA (SEQ ID NO: 4699), PLNGQ (SEQ ID NO: 4700), PLDSA (SEQ ID NO: 4701), RLDGA (SEQ ID NO: 4702), QLNGN (SEQ ID NO: 4703), PLNGY (SEQ ID NO: 4704), PLDSS (SEQ ID NO: 4705), PLNGC (SEQ ID NO: 4706), PLYGA (SEQ ID NO: 4707), TLNGA (SEQ ID NO: 4708), PVDGA (SEQ ID NO: 4709), PLKGA (SEQ ID NO: 4710), PLNGD (SEQ ID NO: 4711), KLDGA (SEQ ID NO: 4712), PHNGA (SEQ ID NO: 4713), PLNGV (SEQ ID NO: 4714), PLNAA (SEQ ID NO: 4715), QLNGY (SEQ ID NO: 4716), PLDGS (SEQ ID NO: 4717), LLNGA (SEQ ID NO: 4718), PLNRA (SEQ ID NO: 4719), PLIGA (SEQ ID NO: 4720), PRNGA (SEQ ID NO: 4721), or ALNGS (SEQ ID NO: 4722). In some embodiments, [N1] is or comprises ALDGA (SEQ ID NO: 4698), ALNGA (SEQ ID NO: 4686), PINGA (SEQ ID NO: 4697), PLDGA (SEQ ID NO: 4691), PLDSA (SEQ ID NO: 4701), PLDSS (SEQ ID NO: 4705), PLNGA (SEQ ID NO: 3679), PLNGG (SEQ ID NO: 4689), PLNGN (SEQ ID NO: 4693), PLNGS (SEQ ID NO: 4687), PLNGT (SEQ ID NO: 4690), QLNGA (SEQ ID NO: 4685), SLDGA (SEQ ID NO: 4694), SLNGA (SEQ ID NO: 4684), or TLNGA (SEQ ID NO: 4708). In some embodiments, wherein [N1]-[N2] comprises LDGAVHLY (SEQ ID NO: 4768), LNGAVHLY (SEQ ID NO: 4769), INGAVHLY (SEQ ID NO: 4770), LDSAVHLY (SEQ ID NO: 4771), LDSSVHLY (SEQ ID NO: 4772), LNGGVHLY (SEQ ID NO: 4773), LNGNVHLY (SEQ ID NO: 4774), LNGSVHLY (SEQ ID NO: 4775), LNGTVHLY (SEQ ID NO: 4776), LNGAVHIY (SEQ ID NO: 4777), LDGAVHVY (SEQ ID NO: 4778), LNGAVHHY (SEQ ID NO: 4779). In some embodiments, [N1]-[N2] is or comprises ALDGAVHLY (SEQ ID NO: 4780), ALNGAVHLY (SEQ ID NO: 4781), PINGAVHLY (SEQ ID NO: 4782), PLDGAVHLY (SEQ ID NO: 4783), PLDSAVHLY (SEQ ID NO: 4784), PLDSSVHLY (SEQ ID NO: 4785), PLNGAVHLY (SEQ ID NO: 3648), PLNGGVHLY (SEQ ID NO: 4786), PLNGNVHLY (SEQ ID NO: 4787), PLNGSVHLY (SEQ ID NO: 4788), PLNGTVHLY (SEQ ID NO: 4789), QLNGAVHLY (SEQ ID NO: 4790), SLDGAVHLY (SEQ ID NO: 4791), SLNGAVHLY (SEQ ID NO: 4792), TLNGAVHLY (SEQ ID NO: 4793), PLNGAVHIY (SEQ ID NO: 4794), PLDGAVHVY (SEQ ID NO: 4795), PLNGAVHHY (SEQ ID NO: 4796); an amino acid sequence comprising any portion of any of the aforesaid amino acid sequences (e.g., any 2, 3, 4, 5, 6, 7, or 8 amino acids, e.g., consecutive amino acids) thereof; an amino acid sequence comprising at least one, two, or three but no more than four modifications, e.g., substitutions (e.g., conservative substitutions), insertions, or deletions, relative to any of the aforesaid amino acid sequences; or an amino acid sequence comprising at least one, two, or three but no more than four different amino acids, relative to any one of the aforesaid amino acid sequences.

[1700] In some embodiments, the AAV capsid polypeptide, e.g., the AAV capsid variant, comprising the amino acid sequence comprising the formula of [N1]-[N2], further comprises [N3], which comprises X6, X7, X8, and X9. In some embodiments, position X6 of [N3] is: A, D, S, or T. In some embodiments, position X7 of [N3] is: Q, K, H, L, P, or R. In some embodiments, position X8 of [N3] is: A, P, E, or R. In some embodiments, position X9 of [N3] is Q, H, K, or P. In some embodiments, [N3] comprises AQ, SQ, AK, DQ, PQ, QA, QP, or KA. In some embodiments, [N3] comprises AQA, AQP, SQA, AKA, DQA, QAQ, QPQ, or KAQ. In some embodiments, [N3] is or comprises AQAQ (SEQ ID NO: 4737), SQAQ (SEQ ID NO: 4738), AQPQ (SEQ ID NO: 4739), AQSQ (SEQ ID NO: 4740), AKAQ (SEQ ID NO: 4741), AHAQ (SEQ ID NO: 4742), AQAP (SEQ ID NO: 4743), DQAQ (SEQ ID NO: 4744), APAQ (SEQ ID NO: 4745), AQAK (SEQ ID NO: 4746), AQAH (SEQ ID NO: 4747), AQEQ (SEQ ID NO: 4748), ALAQ (SEQ ID NO: 4749), ARAQ (SEQ ID NO: 4750), or TQAQ (SEQ ID NO: 4751). In some embodiments, [N3] is or comprises AQAQ (SEQ ID NO: 4737), AQPQ (SEQ ID NO: 4739), SQAQ (SEQ ID NO: 4738), AKAQ (SEQ ID NO: 4741), or DQAQ (SEQ ID NO: 4744). In some embodiments, is or comprises ALDGAVHLYAQAQ (SEQ ID NO: 4827), ALNGAVHLYAQAQ (SEQ ID NO: 4828), PINGAVHLYAQAQ (SEQ ID NO: 4829), PLDGAVHLYAQAQ (SEQ ID NO: 4830), PLDGAVHLYAQPQ (SEQ ID NO: 4831), PLDGAVHLYSQAQ (SEQ ID NO: 4832), PLDSAVHLYAQAQ (SEQ ID NO: 4833), PLDSSVHLYAQAQ (SEQ ID NO: 4834), PLNGAVHLYAKAQ (SEQ ID NO: 4835), PLNGAVHLYAQAQ (SEQ ID NO: 4836), PLNGAVHLYAQPQ (SEQ ID NO: 4837), PLNGAVHLYDQAQ (SEQ ID NO: 4838), PLNGAVHLYSQAQ (SEQ ID NO: 4839), PLNGGVHLYAQAQ (SEQ ID NO: 4840), PLNGNVHLYAQAQ (SEQ ID NO: 4841), PLNGSVHLYAQAQ (SEQ ID NO: 4842), PLNGTVHLYAQAQ (SEQ ID NO: 4843), QLNGAVHLYAQAQ (SEQ ID NO: 4844), SLDGAVHLYAQAQ (SEQ ID NO: 4845), SLNGAVHLYAQAQ (SEQ ID NO: 4846), TLNGAVHLYAQAQ (SEQ ID NO: 4847), PLNGAVHIYAQAQ (SEQ ID NO: 4848), PLDGAVHVYAQAQ (SEQ ID NO: 4849), PLNGAVHHYAQAQ (SEQ ID NO: 4850); an amino acid sequence comprising any portion of any of the aforesaid amino acid sequences (e.g., any 2, 3, 4, 5, 6, 7, 8, 9, 10, 11, or 12 amino acids, e.g., consecutive amino acids) thereof; an amino acid sequence comprising at least one, two, or three but no more than four modifications, e.g., substitutions (e.g., conservative substitutions), insertions, or deletions, relative to any of the aforesaid amino acid sequences; or an amino acid sequence comprising at least one, two, or three but no more than four different amino acids, relative to any one of the aforesaid amino acid sequences.

[1701] In some embodiments, the AAV capsid polypeptide, e.g., the AAV capsid variant, comprising the amino acid sequence comprising the formula [N1]-[N2], further comprises [N4], which comprises X10, X11, and X12. In some embodiments, position X10 of [N4] is: T, V, L, R, S, A, C, I, K, M, N, P, or Q. In some embodiments, position X1I of [N4] is: G, S, A, T, M, V, Q, L, H, I, K, N, P, R, or Y. In some embodiments, position X12 of [N4] is: W, S, P, G, A, Q, L, M, K, C, E, F, H, R, T, V, or Y. In some embodiments, [N4] comprises LS, TG, LA, LT, SA, SS, TL, TT, TS, TA, TV, VS, AA, AG, AS, AT, CS, CT, IA, IG, IL, IQ, IS, IT, LG, LH, LK, LM, LN, LQ, MA, NA, NM, NS, NT, NV, QA, RA, RG, RI, RL, RM, RN, RQ, RS, RT, RV, SG, SM, ST, SV, TK, TM, TN, TP, TQ, TR, VA, VG, VH, VK, VL, VM, VN, VQ, VR, VT, PG, LV, SP, GW, AP, GR, AL, AW, GG, GS, GP, QP, QS, AH, AN, AQ, AR, GQ, HP, KS, MG, MP, MQ, MS, NP, QQ, QR, SH, SK, SQ, SR, IP, VE, AK, AM, AV, GA, GC, GT, KA, KP, KQ, LP, MK, MN, MT, NQ, PP, QH, QK, QM, QN, QT, RW, SL, VW, GK, GN, NG, RP, SN, GL, or VP. In some embodiments, [N4] is or comprises TGW, TGL, TGS, TGG, TAW, TGR, TAS, LSS, TSS, SSL, SSS, TLS, TVS, VSS, TSP, VSP, TMS, LSP, VAS, TAL, TTS, TLP, VLP, RGW, LSG, LAS, SSP, LLP, STS, TSA, TTP, SAL, LGS, VTP, VSA, IGW, TGF, LTP, TLA, LSA, TVG, TAP, TMP, TSL, VQS, SSM, SLP, VSQ, RSS, TST, VMS, TTA, TQP, LST, LAP, TVA, RLS, TGY, TSG, TAG, VMP, TSQ, TMA, VGS, TSW, TGV, TGT, TLG, LMP, VQP, TGM, SMS, SQL, IGS, RSV, TAA, STP, LSQ, TAQ, TGP, ASP, VSG, SAP, TLQ, LQP, TAT, TGQ, ATS, IGG, VAA, TSM, TVW, TAM, TGA, VAT, QSP, TQA, VQA, RSP, LAT, VAQ, LAA, RST, RTL, LGT, LMS, LGP, RTS, SQP, VLG, SVS, TMQ, SAV, LAG, SGP, TNS, RLT, TTQ, SAA, TSV, RLG, RAS, STQ, CSP, SAG, ALP, VTS, ISP, SVG, LTS, TTT, RSG, TQL, LNP, TVQ, IAS, LAQ, LSR, LSN, TTG, TSN, SMA, TKS, SVA, TQQ, VQQ, RLP, SAM, TAV, TQW, SSR, TQT, VNS, RSA, LMG, RQS, LVG, VTA, RTT, SMG, VMA, TKP, SAQ, NSP, ATP, VAG, RGS, VKP, RMS, NLP, NAL, RTP, RQL, VQG, VTG, VST, NAS, RVE, ATG, AMS, RNS, VMQ, SMQ, LQQ, TMG, LGQ, TSH, AAP, RSQ, TYS, ITP, VAK, TQM, TKA, SQQ, ISG, VSR, RTA, RML, SQM, VAN, CTP, ISS, AGP, TAK, RTG, LHP, TMT, AQP, QAP, RQP, LKS, NTT, TSK, RYS, KSS, NTP, VGG, IAA, LMA, MAP, VHP, VLS, LAN, ATQ, TNA, TAN, VSN, AAA, AVG, LTA, SAN, RAG, RQG, TLR, LSH, SAF, RAA, IQP, ILG, VNG, SVQ, LSK, TNG, RTQ, TMN, RGG, TTR, VRP, VKA, LAR, NQP, TMK, TYA, TQK, TTK, IAG, TQN, LAH, NTQ, RQQ, RAQ, TKQ, TQH, TNQ, LMQ, VNA, VQT, TQR, VGK, VKQ, IQS, LQR, TMM, VGN, RIG, SAK, RIA, VQN, NVQ, RIP, NAQ, NMQ, TPS, LTN, VTK, PGW, LPP, SPP, TPA, TGC, VPP, TPT, TPW, TPP, RPP, TPQ, TPR, TPG, VPA, VPQ, RPG, KGW, TRW, TAR, IPP, RSL, LVP, KGS, VAP, KGG, KAW, PGS, TRL, or AGW.

[1702] In some embodiments, the AAV capsid polypeptide, e.g., the AAV capsid variant, comprising the amino acid sequence comprising the formula [N1]-[N2], further comprises [N5] which comprises X13, X14, and X15. In some embodiments, position X13 of [N5] is: V, D, F, G, L, A, E, or I. In some embodiments, position X14 of [N5] is: Q, K, R, H, E, L, or P. In some embodiments, position X15 of [N5] is: N, T, K, H, D, Y, S, I, or P. In some embodiments, [N5] comprises VQ, AQ, DQ, FQ, VL, LQ, EQ, GQ, VP, VR, VK, QN, QS, QT, QK, QH, LN, QI, PN, QD, QP, RN, or KN. In some embodiments, [N5] is or comprises VQN, VKN, VQT, VQK, DQN, VQH, GQN, VQI, VHN, FQN, LQN, VLN, VRN, VQS, VQY, AQN, VEN, VQD, VPN, IQN, VKK, DKN, VKT, VQP, EQN, GQT, FQK, GHN, or VPH. In some embodiments [N5] is or comprises VQN, AQN, VQS, DQN, VQT, VQK, VQH, FQN, VLN, LQN, VQI, EQN, GQT, VPN, VQD, VQP, VRN, or VKN. In some embodiments [N4]-[N5] is or comprises TGWVQN (SEQ ID NO: 4851), LAAVQN (SEQ ID NO: 4852), LTPVQN (SEQ ID NO: 4853), SAPVQN (SEQ ID NO: 4854), SSPVQN (SEQ ID NO: 4855), TGRVQN (SEQ ID NO: 4856), TGWAQN (SEQ ID NO: 4857), TGWVQS (SEQ ID NO: 4858), TLAVQN (SEQ ID NO: 4859), TTSVQN (SEQ ID NO: 4860), TSPVQN (SEQ ID NO: 4861), TALVQN (SEQ ID NO: 4862), TAWVQN (SEQ ID NO: 4863), TGGVQN (SEQ ID NO: 4864), TGSVQN (SEQ ID NO: 4865), TGWDQN (SEQ ID NO: 4866), TVSVQN (SEQ ID NO: 4867), VSPVQN (SEQ ID NO: 4868), VSSVQN (SEQ ID NO: 4869), AAPVQN (SEQ ID NO: 4870), AGPVQN (SEQ ID NO: 4871), ASPVQN (SEQ ID NO: 4872), ATPVQN (SEQ ID NO: 4873), CSPVQN (SEQ ID NO: 4874), CTPVQN (SEQ ID NO: 4875), IAAVQN (SEQ ID NO: 4876), IAGVQN (SEQ ID NO: 4877), IASVQN (SEQ ID NO: 4878), IGGVQN (SEQ ID NO: 4879), IGSVQN (SEQ ID NO: 4880), ILGVQN (SEQ ID NO: 4881), IQPVQN (SEQ ID NO: 4882), IQSVQN (SEQ ID NO: 4883), ISGVQN (SEQ ID NO: 4884), ISPVQN (SEQ ID NO: 4885), ISSVQN (SEQ ID NO: 4886), ITPVQN (SEQ ID NO: 4887), LAGVQN (SEQ ID NO: 4888), LAHVQN (SEQ ID NO: 4889), LANVQN (SEQ ID NO: 4890), LAPVQN (SEQ ID NO: 4891), LAPVQT (SEQ ID NO: 4892), LAQVQN (SEQ ID NO: 4893), LARVQN (SEQ ID NO: 4894), LASVQN (SEQ ID NO: 4895), LATVQN (SEQ ID NO: 4896), LGPVQN (SEQ ID NO: 4897), LGQVQN (SEQ ID NO: 4898), LGSVQN (SEQ ID NO: 4899), LHPVQN (SEQ ID NO: 4900), LKSVQN (SEQ ID NO: 4901), LMAVQN (SEQ ID NO: 4902), LMGVQN (SEQ ID NO: 4903), LMPVQN (SEQ ID NO: 4904), LMQVQN (SEQ ID NO: 4905), LMSVQN (SEQ ID NO: 4906), LNPVQN (SEQ ID NO: 4907), LQPVQN (SEQ ID NO: 4908), LQQVQN (SEQ ID NO: 4909), LQRVQN (SEQ ID NO: 4910), LSHVQN (SEQ ID NO: 4911), LSKVQN (SEQ ID NO: 4912), LSPVQK (SEQ ID NO: 4913), LSPVQN (SEQ ID NO: 4914), LSQVQN (SEQ ID NO: 4915), LSRVQN (SEQ ID NO: 4916), LSTVQN (SEQ ID NO: 4917), LTAVQN (SEQ ID NO: 4918), LTNVQN (SEQ ID NO: 4919), LTSVQN (SEQ ID NO: 4920), MAPVQN (SEQ ID NO: 4921), NAQVQN (SEQ ID NO: 4922), NASVQN (SEQ ID NO: 4923), NMQVQN (SEQ ID NO: 4924), NSPVQN (SEQ ID NO: 4925), NTPVQN (SEQ ID NO: 4926), NVQVQN (SEQ ID NO: 4927), QAPVQN (SEQ ID NO: 4928), RAAVQN (SEQ ID NO: 4929), RAQVQN (SEQ ID NO: 4930), RASVQN (SEQ ID NO: 4931), RGGVQN (SEQ ID NO: 4932), RGSVQN (SEQ ID NO: 4933), RIAVQN (SEQ ID NO: 4934), RIGVQN (SEQ ID NO: 4935), RIPVQN (SEQ ID NO: 4936), RLGVQN (SEQ ID NO: 4937), RLSVQN (SEQ ID NO: 4938), RMSVQN (SEQ ID NO: 4939), RNSVQN (SEQ ID NO: 4940), RQPVQN (SEQ ID NO: 4941), RSAVQN (SEQ ID NO: 4942), RSGVQN (SEQ ID NO: 4943), RSPVQN (SEQ ID NO: 4944), RSQVQN (SEQ ID NO: 4945), RSSVQN (SEQ ID NO: 4946), RSTVQN (SEQ ID NO: 4947), RTAVQN (SEQ ID NO: 4948), RTGVQN (SEQ ID NO: 4949), RTLVQN (SEQ ID NO: 4950), RTSVQN (SEQ ID NO: 4951), RTTVQN (SEQ ID NO: 4952), RVEVQN (SEQ ID NO: 4953), SAAVQN (SEQ ID NO: 4954), SAKVQN (SEQ ID NO: 4955), SAMVQN (SEQ ID NO: 4956), SAQVQN (SEQ ID NO: 4957), SGPVQN (SEQ ID NO: 4958), SMAVQN (SEQ ID NO: 4959), SMGVQN (SEQ ID NO: 4960), SMQVQN (SEQ ID NO: 4961), SMSVQN (SEQ ID NO: 4962), STPVQN (SEQ ID NO: 4963), SVAVQN (SEQ ID NO: 4964), SVGVQN (SEQ ID NO: 4965), TAAVQN (SEQ ID NO: 4966), TAGVQN (SEQ ID NO: 4967), TAKVQN (SEQ ID NO: 4968), TAMVQN (SEQ ID NO: 4969), TANVQN (SEQ ID NO: 4970), TAPVQN (SEQ ID NO: 4971), TAPVQT (SEQ ID NO: 4972), TAQVQN (SEQ ID NO: 4973), TASVQN (SEQ ID NO: 4974), TASVQT (SEQ ID NO: 4975), TATVQN (SEQ ID NO: 4976), TAVVQN (SEQ ID NO: 4977), TAWDQN (SEQ ID NO: 4978), TAWVQH (SEQ ID NO: 4979), TAWVQT (SEQ ID NO: 4980), TGAVQN (SEQ ID NO: 4981), TGCFQN (SEQ ID NO: 4982), TGGAQN (SEQ ID NO: 4983), TGGFQN (SEQ ID NO: 4984), TGGVLN (SEQ ID NO: 4985), TGGVQH (SEQ ID NO: 4986), TGGVQK (SEQ ID NO: 4987), TGGVQT (SEQ ID NO: 4988), TGPVQN (SEQ ID NO: 4989), TGSAQN (SEQ ID NO: 4990), TGSLQN (SEQ ID NO: 4991), TGSVQH (SEQ ID NO: 4992), TGSVQI (SEQ ID NO: 4993), TGSVQS (SEQ ID NO: 4994), TGSVQT (SEQ ID NO: 4995), TGTVQN (SEQ ID NO: 4996), TGWEQN (SEQ ID NO: 4997), TGWFQN (SEQ ID NO: 4998), TGWGQT (SEQ ID NO: 4999), TGWVPN (SEQ ID NO: 5000), TGWVQD (SEQ ID NO: 5001), TGWVQP (SEQ ID NO: 5002), TGWVQT (SEQ ID NO: 5003), TGWVRN (SEQ ID NO: 5004), TKAVQN (SEQ ID NO: 5005), TKPVQN (SEQ ID NO: 5006), TKQVQN (SEQ ID NO: 5007), TKSVQN (SEQ ID NO: 5008), TLPVQN (SEQ ID NO: 5009), TLQVQN (SEQ ID NO: 5010), TMAVQN (SEQ ID NO: 5011), TMGVQN (SEQ ID NO: 5012), TMKVQN (SEQ ID NO: 5013), TMNVQN (SEQ ID NO: 5014), TMPVQN (SEQ ID NO: 5015), TMQVQN (SEQ ID NO: 5016), TMSVKN (SEQ ID NO: 5017), TMSVQN (SEQ ID NO: 5018), TMSVQT (SEQ ID NO: 5019), TMTVQN (SEQ ID NO: 5020), TNAVQN (SEQ ID NO: 5021), TNQVQN (SEQ ID NO: 5022), TNSVQN (SEQ ID NO: 5023), TPPVQN (SEQ ID NO: 5024), TQHVQN (SEQ ID NO: 5025), TQKVQN (SEQ ID NO: 5026), TQMVQN (SEQ ID NO: 5027), TQNVQN (SEQ ID NO: 5028), TQPVQN (SEQ ID NO: 5029), TQQVQN (SEQ ID NO: 5030), TQTVQN (SEQ ID NO: 5031), TRWDQN (SEQ ID NO: 5032), TSAVQN (SEQ ID NO: 5033), TSGVQN (SEQ ID NO: 5034), TSHVQN (SEQ ID NO: 5035), TSKVQN (SEQ ID NO: 5036), TSLVQN (SEQ ID NO: 5037), TSMVQN (SEQ ID NO: 5038), TSPDQN (SEQ ID NO: 5039), TSQVQN (SEQ ID NO: 5040), TSSVQN (SEQ ID NO: 5041), TSSVQT (SEQ ID NO: 5042), TSTVQN (SEQ ID NO: 5043), TSVVQN (SEQ ID NO: 5044), TTAVQN (SEQ ID NO: 5045), TTGVQN (SEQ ID NO: 5046), TTKVQN (SEQ ID NO: 5047), TTPVQN (SEQ ID NO: 5048), TTPVQT (SEQ ID NO: 5049), TTQVQN (SEQ ID NO: 5050), TTTVQN (SEQ ID NO: 5051), TVAVQN (SEQ ID NO: 5052), TVAVQT (SEQ ID NO: 5053), TVGVQN (SEQ ID NO: 5054), TVQVQN (SEQ ID NO: 5055), TVSVKN (SEQ ID NO: 5056), TVWVQK (SEQ ID NO: 5057), VAAVQN (SEQ ID NO: 5058), VAGVQN (SEQ ID NO: 5059), VAKVQN (SEQ ID NO: 5060), VANVQN (SEQ ID NO: 5061), VAQVQN (SEQ ID NO: 5062), VASVQN (SEQ ID NO: 5063), VATVQN (SEQ ID NO: 5064), VGGVQN (SEQ ID NO: 5065), VGKVQN (SEQ ID NO: 5066), VGNVQN (SEQ ID NO: 5067), VGSVQN (SEQ ID NO: 5068), VHPVQN (SEQ ID NO: 5069), VKAVQN (SEQ ID NO: 5070), VKPVQN (SEQ ID NO: 5071), VKQVQN (SEQ ID NO: 5072), VLPVQN (SEQ ID NO: 5073), VLSVQN (SEQ ID NO: 5074), VMAVQN (SEQ ID NO: 5075), VMQVQN (SEQ ID NO: 5076), VMSVQN (SEQ ID NO: 5077), VNAVQN (SEQ ID NO: 5078), VNGVQN (SEQ ID NO: 5079), VNSVQN (SEQ ID NO: 5080), VQAVQN (SEQ ID NO: 5081), VQNVQN (SEQ ID NO: 5082), VQPVQN (SEQ ID NO: 5083), VQQVQN (SEQ ID NO: 5084), VQSVQN (SEQ ID NO: 5085), VQTVQN (SEQ ID NO: 5086), VRPVQN (SEQ ID NO: 5087), VSAVQN (SEQ ID NO: 5088), VSGVQN (SEQ ID NO: 5089), VSNVQN (SEQ ID NO: 5090), VSPVQT (SEQ ID NO: 5091), VSQVQN (SEQ ID NO: 5092), VSRVQN (SEQ ID NO: 5093), VSSVQK (SEQ ID NO: 5094), VSSVQT (SEQ ID NO: 5095), VSTVQN (SEQ ID NO: 5096), VTAVQN (SEQ ID NO: 5097), VTGVQN (SEQ ID NO: 5098), VTKVQN (SEQ ID NO: 5099), VTPVQN (SEQ ID NO: 5100), VTSVQN (SEQ ID NO: 5101), TGLVQN (SEQ ID NO: 5102), TGWVKN (SEQ ID NO: 5103), PGWVQN (SEQ ID NO: 5104), TGWVQH (SEQ ID NO: 5105), LSGVQN (SEQ ID NO: 5106), LSSVQN (SEQ ID NO: 5107), LVPVQN (SEQ ID NO: 5108); an amino acid sequence comprising any portion of any of the aforesaid amino acid sequences (e.g., any 2, 3, 4, 5, or 6 amino acids, e.g., consecutive amino acids) thereof; an amino acid sequence comprising at least one, two, or three but no more than four modifications, e.g., substitutions (e.g., conservative substitutions), insertions, or deletions, relative to any of the aforesaid amino acid sequences; or an amino acid sequence comprising at least one, two, or three but no more than four different amino acids, relative to any one of the aforesaid amino acid sequences.

[1703] In some embodiments, [N1]-[N2]-[N3]-[N4]-[N5] of the AAV capsid variant comprises the amino acid sequence of any of SEQ ID NOs: 139-1138; an amino acid sequence comprising at least one, two, or three but no more than four modifications, e.g., substitutions (e.g., conservative substitutions), insertions, or deletions, relative to any of SEQ ID NOs: 139-1138; or an amino acid sequence comprising at least one, two, or three but no more than four different amino acids, relative to any one of SEQ ID NOs: 139-1138. In some embodiments, [N1]-[N2]-[N3]-[N4]-[N5] comprises the amino acid sequence of any of SEQ ID NOs: 139-476; an amino acid sequence comprising at least one, two, or three but no more than four modifications, e.g., substitutions (e.g., conservative substitutions), insertions, or deletions, relative to any of SEQ ID NOs: 139-476; or an amino acid sequence comprising at least one, two, or three but no more than four different amino acids, relative to any one of SEQ ID NOs: 139-476.

[1704] In some embodiments, [N1]-[N2] is present in loop VIII of the AAV capsid variant. In some embodiments, [N3], [N4], and/or [N5] are present in loop VIII of the AAV capsid variant. In some embodiments, [N] is present immediately subsequent to position 586, relative to a reference sequence numbered according to the amino acid sequence of SEQ ID NO: 138. In some embodiments, [N2] is present immediately subsequent to [N1]. In some embodiments, [N3] is present immediately subsequent to position 588, relative to a reference sequence numbered according to the amino acid sequence of SEQ ID NO: 138. In some embodiments, [N4] is present immediately subsequent to position 592, relative to a reference sequence numbered according to the amino acid sequence of SEQ ID NO: 138. In some embodiments, [N5] is present immediately subsequent to position 595, relative to a reference sequence numbered according to the amino acid sequence of SEQ ID NO: 138. in some embodiments, [N1]-[N2]-[N3]-[N4]-[N5] is present immediately subsequent to position 586, relative to a reference sequence numbered according to the amino acid sequence of SEQ ID NO: 138.

[1705] In some embodiments, the AAV capsid polypeptide, e.g., the AAV capsid variant, comprises from N to C-terminus, [N1]-[N2]. In some embodiments, the AAV capsid polypeptide, e.g., the AAV capsid variant, comprises from N to C-terminus, [N1]-[N2]-[N3]. In some embodiments, the AAV capsid polypeptide, e.g., the AAV capsid variant, comprises from N to C-terminus, [N1]-[N2]-[N3]-[N4]. In some embodiments, the AAV capsid polypeptide, e.g., the AAV capsid variant, comprises from N to C-terminus, [N1]-[N2]-[N3]-[N4]-[N5].

[1706] In some embodiments, the AAV capsid polypeptide, e.g., the AAV capsid variant, comprises an amino acid sequence having the formula [A][B], wherein [A] comprises the amino acid sequence of PLNGA (SEQ ID NO: 3679), and [B] comprises X1, X2, X3, and X4. In some embodiments, position X1 of [B] is: V, I, L, A, F, D, or G. In some embodiments, position X2 of [B] is H, N, Q, P, D, L, R, or Y. In some embodiments, position X3 of [B] is L, H, I, R, or V. In some embodiments, position X4 of [B] is Y. In some embodiments, [B] comprises VH, VN, VQ, IH, LH, VP, VD, AH, FH, DH, VL, GH, VR, VY, LY, HY, IY, RY, HL, HH, HI, NL, QL, PL, DL, HR, LL, RL, HV, or YL. In some embodiments, B comprises VHL, VHH, VHI, VNL, VQL, IHL, LHL, VPL, VDL, AHL, VHR, FHL, DHL, VLL, GHL, VRL, VHV, VYL, HLY, HHY, HIY, NLY, QLY, PLY, DLY, HRY, LLY, RLY, HVY, YLY. In some embodiments, [B] is or comprises VHLY (SEQ ID NO: 4680), VHHY (SEQ ID NO: 4683), VHIY (SEQ ID NO: 4681), VNLY (SEQ ID NO: 4724), VQLY (SEQ ID NO: 4729), IHLY (SEQ ID NO: 4730), LHLY (SEQ ID NO: 4727), VPLY (SEQ ID NO: 4723), VDLY (SEQ ID NO: 4731), AHLY (SEQ ID NO: 4732), VHRY (SEQ ID NO: 4725), FHLY (SEQ ID NO: 4726), DHLY (SEQ ID NO: 4728), VLLY (SEQ ID NO: 4733), GHLY (SEQ ID NO: 4734), VRLY (SEQ ID NO: 4735), VHVY (SEQ ID NO: 4682), or VYLY (SEQ ID NO: 4736). In some embodiments, [B] is or comprises VHLY (SEQ ID NO: 4680), VHHY (SEQ ID NO: 4683), or VHIY (SEQ ID NO: 4681). In some embodiments, [A][B] is or comprises PLNGAVHLY (SEQ ID NO: 3648), PLNGAVHHY (SEQ ID NO: 4796), PLNGAVHIY (SEQ ID NO: 4794), PLNGAVNLY (SEQ ID NO: 5123), PLNGAVQLY (SEQ ID NO: 5124), PLNGAIHLY (SEQ ID NO: 5125), PLNGALHLY (SEQ ID NO: 5126), PLNGAVPLY (SEQ ID NO: 5127), PLNGAVDLY (SEQ ID NO: 5128), PLNGAAHLY (SEQ ID NO: 5129), PLNGAVHRY (SEQ ID NO: 5130), PLNGAFHLY (SEQ ID NO: 5131), PLNGADHLY (SEQ ID NO: 5132), PLNGAVLLY (SEQ ID NO: 5133), PLNGAGHLY (SEQ ID NO: 5134), PLNGAVRLY (SEQ ID NO: 5135), PLNGAVHVY (SEQ ID NO: 5136), or PLNGAVYLY (SEQ ID NO: 5137); an amino acid sequence comprising any portion of any of the aforesaid amino acid sequences, e.g., any 2, 3, 4, 5, 6, 7, or 8 amino acids, e.g., consecutive amino acids, thereof; an amino acid sequence comprising at least one, two, or three but no more than four modifications, e.g., substitutions (e.g., conservative substitutions), insertions, or deletions, relative to any of the aforesaid amino acid sequences; or an amino acid sequence comprising at least one, two, or three but no more than four different amino acids, relative to any one of the amino aforesaid acid sequences.

[1707] In some embodiments, a AAV capsid polypeptide, e.g., the AAV capsid variant, comprising an amino acid sequence comprising the formula [A][B], further comprises [C] which comprises X4, X5, X6, and X7. In some embodiments, position X4 of [C] is: A, D, S, or T. In some embodiments, position X5 of [C] is Q, K, H, L, P, or R. In some embodiments, position X6 of [C] is A, P, or E. In some embodiments, position X7 of [C] is Q, H, K, or P. In some embodiments [C] comprises AQ, AK, DQ, SQ, AH, AL, AP, AR, TQ, PQ, EQ, QA, QP, KA, HA, QE, LA, PA, or RA. In some embodiments [C] comprises AQA, AQP, AKA, DQA, SQA, AHA, AQE, ALA, APA, ARA, TQA, QAQ, QPQ, KAQ, HAQ, QEQ, QAK, LAQ, PAQ, RAQ, QAH, or QAP. In some embodiments [C] is or comprises AQAQ (SEQ ID NO: 4737), AQPQ (SEQ ID NO: 4739), AKAQ (SEQ ID NO: 4741), DQAQ (SEQ ID NO: 4744), SQAQ (SEQ ID NO: 4738), AHAQ (SEQ ID NO: 4742), AQEQ (SEQ ID NO: 4748), AQAK (SEQ ID NO: 4746), ALAQ (SEQ ID NO: 4749), APAQ (SEQ ID NO: 4745), ARAQ (SEQ ID NO: 4750), AQAH (SEQ ID NO: 4747), AQAP (SEQ ID NO: 4743), or TQAQ (SEQ ID NO: 4751). In some embodiments, [C] is or comprises AQAQ (SEQ ID NO: 4737), AQPQ (SEQ ID NO: 4739), AKAQ (SEQ ID NO: 4741), DQAQ (SEQ ID NO: 4744), or SQAQ (SEQ ID NO: 4738). In some embodiments [B][C] is or comprises VHLYAQAQ (SEQ ID NO: 4797), VHHYAQAQ (SEQ ID NO: 4804), VHLYAQPQ (SEQ ID NO: 4798), VHLYAKAQ (SEQ ID NO: 4800), VHLYDQAQ (SEQ ID NO: 4801), VHLYSQAQ (SEQ ID NO: 4799), VHIYAQAQ (SEQ ID NO: 4802), VHLYAHAQ (SEQ ID NO: 5138), VNLYAQAQ (SEQ ID NO: 5139), VQLYAQAQ (SEQ ID NO: 5140), VHLYAQEQ (SEQ ID NO: 5141), IHLYAQAQ (SEQ ID NO: 5142), LHLYAQAQ (SEQ ID NO: 5143), VPLYAQAQ (SEQ ID NO: 5144), VHLYAQAK (SEQ ID NO: 5145), VDLYAQAQ (SEQ ID NO: 5146), AHLYAQAQ (SEQ ID NO: 5147), VHRYAQAQ (SEQ ID NO: 5148), FHLYAQAQ (SEQ ID NO: 5149), VHLYALAQ (SEQ ID NO: 5150), DHLYAQAQ (SEQ ID NO: 5151), VHLYAPAQ (SEQ ID NO: 5152), VHLYARAQ (SEQ ID NO: 5153), VHLYAQAH (SEQ ID NO: 5154), VLLYAQAQ (SEQ ID NO: 5155), VHLYAQAP (SEQ ID NO: 5156), GHLYAQAQ (SEQ ID NO: 5157), VRLYAQAQ (SEQ ID NO: 5158), VHVYAQAQ (SEQ ID NO: 4803), VYLYAQAQ (SEQ ID NO: 5159), VHLYTQAQ (SEQ ID NO: 5160); an amino acid sequence comprising any portion of any of the aforesaid amino acid sequences, e.g., any 2, 3, 4, 5, 6, or 7 amino acids, e.g., consecutive amino acids, thereof; an amino acid sequence comprising at least one, two, or three but no more than four modifications, e.g., substitutions (e.g., conservative substitutions), insertions, or deletions, relative to any of the aforesaid amino acid sequences; or an amino acid sequence comprising at least one, two, or three but no more than four different amino acids, relative to any one of the aforesaid amino acid sequences. In some embodiments, [A][B][C][D] is or comprises PLNGAVHLYAQAQ (SEQ ID NO: 4836), PLNGAVHHYAQAQ (SEQ ID NO: 4850), PLNGAVHLYAQPQ (SEQ ID NO: 4837), PLNGAVHLYAKAQ (SEQ ID NO: 4835), PLNGAVHLYDQAQ (SEQ ID NO: 4838), PLNGAVHLYSQAQ (SEQ ID NO: 4839), PLNGAVHIYAQAQ (SEQ ID NO: 4848), PLNGAVHLYAHAQ (SEQ ID NO: 5181), PLNGAVNLYAQAQ (SEQ ID NO: 5182), PLNGAVQLYAQAQ (SEQ ID NO: 5183), PLNGAVHLYAQEQ (SEQ ID NO: 5184), PLNGAIHLYAQAQ (SEQ ID NO: 5185), PLNGALHLYAQAQ (SEQ ID NO: 5186), PLNGAVPLYAQAQ (SEQ ID NO: 5187), PLNGAVHLYAQAK (SEQ ID NO: 5188), PLNGAVDLYAQAQ (SEQ ID NO: 5189), PLNGAAHLYAQAQ (SEQ ID NO: 5190), PLNGAVHRYAQAQ (SEQ ID NO: 5191), PLNGAFHLYAQAQ (SEQ ID NO: 5192), PLNGAVHLYALAQ (SEQ ID NO: 5193), PLNGADHLYAQAQ (SEQ ID NO: 5194), PLNGAVHLYAPAQ (SEQ ID NO: 5195), PLNGAVHLYARAQ (SEQ ID NO: 5196), PLNGAVHLYAQAH (SEQ ID NO: 5197), PLNGAVLLYAQAQ (SEQ ID NO: 5198), PLNGAVHLYAQAP (SEQ ID NO: 5199), PLNGAGHLYAQAQ (SEQ ID NO: 5200), PLNGAVRLYAQAQ (SEQ ID NO: 5201), PLNGAVHVYAQAQ (SEQ ID NO: 5202), PLNGAVYLYAQAQ (SEQ ID NO: 5203), PLNGAVHLYTQAQ (SEQ ID NO: 5204); an amino acid sequence comprising any portion of any of the aforesaid amino acid sequences, e.g., any 2, 3, 4, 5, 6, 7, 8, 9, 10, 11, or 12 amino acids, e.g., consecutive amino acids, thereof; an amino acid sequence comprising at least one, two, or three but no more than four modifications, e.g., substitutions (e.g., conservative substitutions), insertions, or deletions, relative to any of the aforesaid amino acid sequences; or an amino acid sequence comprising at least one, two, or three but no more than four different amino acids, relative to any one of the aforesaid amino acid sequences.

[1708] In some embodiments, the AAV capsid polypeptide, e.g., the AAV capsid variant, comprising an amino acid sequence comprising the formula [A][B], further comprises [D], which comprises X8, X9, and X10. In some embodiments, position X8 of [D] is: T, V, S, L, R, I, A, N, C, Q, M, P, or K. In some embodiments, position X9 of [D] is: T, M, A, G, K, S, Q, V, I, R, N, P, L, H, or Y. In some embodiments, position X10 of [D] is: K, Q, W, S, P, C, A, G, N, T, R, V, M, H, L, E, F, or Y. In some embodiments, [D] comprises TT, TM, VA, TA, TG, VK, SA, LS, LA, TQ, TV, RI, RA, LT, ST, TS, VS, VT, RQ, IS, VR, LG, TN, VQ, AA, RS, IQ, IA, RG, NS, LQ, VM, SM, VG, CS, TP, SS, AG, TL, LN, TK, CT, AS, LK, LM, LH, RT, RM, VH, TR, SG, VL, QA, NA, AT, NT, RL, IT, IG, RN, NM, NV, MA, IL, VN, SV, RV, PG, QS, RY, SQ, NQ, LL, LP, AQ, TY, NL, SP, LV, KG, VP, AV, KS, AM, SL, AL, RP, IP, MK, AW, GS, KQ, AP, SK, AK, GC, QK, MQ, QP, GP, QQ, AN, GK, QR, PP, AR, GG, MS, NP, KP, MN, KA, SN, MP, HP, GN, RW, MT, SR, GW, QH, GL, QM, VW, MG, AH, QT, GR, SH, GQ, GT, GA, NG, QN, VE, MM, QL, QG, YS, GM, LR, AF, PQ, SW, QW, YA, ML, GF, PA, PS, PT, GY, GV, PW, PR. In some embodiments, [D] is or comprises TTK, TMK, VAQ, TAW, TGS, VKQ, SAP, LSK, LAP, LAQ, TAK, SAK, TGC, TQK, TVA, LSP, TTQ, TAQ, RIA, RAS, TTP, LTP, STP, TSP, TMQ, TSK, VSQ, VSP, TVQ, VTA, RQP, ISG, VRP, LGP, TNQ, VQQ, VAN, AAP, RST, TMA, IQP, IAS, TVS, RGS, NSP, LQP, VTG, VMQ, SMA, VGK, IQS, CSP, LQR, TPP, VTK, SSP, AGP, LAR, TTT, TGG, TLQ, TMS, VAK, RAA, TVG, LNP, LSQ, TKP, TNA, LAT, VTP, VQA, TTS, CTP, TAG, TSQ, TMN, TST, VKP, ASP, VAA, LKS, IAA, TAA, TKA, VSN, TAP, LMP, LHP, RAQ, LTN, RTT, TSV, RMS, VGN, LMQ, TAT, VHP, ISS, VAS, TRW, TMT, RSS, RTG, VAT, VTS, VSS, TNS, VKA, SGP, TGP, TAM, TQP, TQQ, VSR, TGW, VSA, VLS, TQH, LAS, QAP, NAQ, ATP, VQP, TTA, LAA, RSG, LMA, TMP, LAN, VST, SAQ, NTP, TGL, TAV, RLG, RTL, TQM, ITP, TVW, RSA, TAS, TMG, VQS, ISP, VGG, TAL, LAG, RTA, RSP, TLA, LAH, TSL, RLS, LMG, SMQ, TQT, VGS, VSG, VMA, IGG, IAG, TGR, LSH, VQT, RNS, TLP, TKQ, LGQ, NMQ, NVQ, RGG, VMS, TTG, LSR, MAP, ILG, TGT, TSS, TSH, RIG, SAM, TSM, SMG, SMS, TSG, TGA, VNS, VAG, IGS, LGS, VNG, LTA, VQN, TKS, SVG, NAS, TSA, TAN, LTS, RSQ, RIP, RVE, VLP, SVA, LQQ, LST, SAA, RTS, TQN, VNA, LMS, TMM, RSV, TQL, RTP, RQQ, VQG, PGW, STQ, QSP, RYS, TQR, SAG, RQS, SQP, STS, VLG, NQP, LGT, RAG, TGM, LSN, RLP, RQG, RLT, TLR, SAF, SVQ, LLP, RTQ, LPP, AQP, TPQ, TSW, NTT, TTR, TQW, NTQ, TYA, TLS, NLP, ATS, ATQ, LSS, TQA, VMP, NAL, RML, RQL, TLG, TGF, SAL, SQL, LSA, TGQ, TNG, AAA, SAV, LSG, SSR, SPP, LVG, TPA, KGW, VPP, ATG, SAN, SQQ, SSM, AVG, VAP, TPS, RGW, SSL, TYS, TPT, IGW, KSS, TGY, RSL, SVS, TSN, SQM, VPA, AMS, TPG, TGV, VPQ, SLP, ALP, TPW, TPR, SSS, RPP, IPP, AGW, or RPG.

[1709] In some embodiments, the AAV capsid polypeptide, e.g., the AAV capsid variant, comprising the amino acid sequence comprising the formula [A][B], further comprises [E], which comprises X11, X12, and X13. In some embodiments, X1I of [E] is: V, D, F, A, E, L, G, or I. In some embodiments, X12 of [E] is Q, R, P, K, L, H, or E. In some embodiments, X13 of [E] is: N, H, S, T, P, K, I, D, or Y. In some embodiments, [E] comprises VQ, DQ, FQ, VR, VP, VK, AQ, EQ, LQ, GQ, VL, VH, VE, DK, GH, IQ, QN, QH, QS, QT, QP, RN, PN, KN, QK, QI, LN, QD, HN, KT, KK, EN, QY, or PH. In some embodiments, [E] is or comprises VQN, DQN, VQH, FQN, VQS, VQT, VQP, VRN, VPN, VKN, AQN, VQK, EQN, VQI, LQN, GQT, VLN, VQD, VHN, GQN, VKT, VKK, FQK, VEN, VQY, DKN, GHN, IQN, or VPH.

[1710] In some embodiments, [A][B][C][D][E] of the AAV capsid variant comprises the amino acid sequence of any of SEQ ID NOs: 143, 148, 149, 151, 153, 154-158, 160-163, 166, 168, 170, 171, 173-175, 177-179, 181, 182, 184-188, 191-197, 199-210, 212-215, 217-225, 227-231, 233, 234, 236-240, 243-262, 265, 267, 268, 270-277, 279, 282, 284-286, 288-293, 295, 296, 298, 300-314, 316-327, 329, 331, 332, 334, 336, 337-344, 346-350, 352-354, 356-365, 367, 369, 371-380, 382-385, 387, 392-394, 396, 397, 399-401, 404-411, 413-415, 417, 419-429, 432, 433, 435-437, 438, 440-442, 444-447, 450-454, 456, 458-461, 464, 465, 467-469, 471-484, 487-495, 497, 498, 500-503, 505, 507-512, 514-517, 522-525, 528-539, 542-545, 547, 551-555, 558-561, 563-568, 570, 573, 574, 576, 579, 581, 582, 584, 586, 587, 591-596, 598, 601, 604, 605, 606, 607, 610, 612, 614-619, 624-629, 631-636, 640, 641, 645, 646, 649, 650, 656, 658, 661, 663, 664, 666, 668, 669, 670, 672, 673, 674, 675, 677, 679, 683, 684, 686, 688, 689, 691, 693, 695, 696, 697, 699, 700, 701, 702, 704-706, 709-714, 720, 722, 725-731, 733, 736, 740, 745, 749-752, 754, 755, 757, 758, 760-765, 767, 768, 770, 771, 773, 778-780, 783-788, 792-794, 797-799, 801, 802, 804-806, 812, 814, 815, 817, 818, 820, 821, 824, 828, 831, 832, 834-837, 839, 840-845, 847, 848, 850-855, 857-859, 861, 862, 865, 866, 869-872, 874-876, 882-884, 887, 889-895, 897, 899, 901, 903-905, 907, 908, 910, 911, 913, 915, 919, 920, 923, 924, 926, 927, 929, 931-933, 935, 937, 939-949, 952-955, 957, 958, 960, 962, 964, 965, 967, 971, 973, 974, 976, 977, 981, 985-989, 992, 994, 997-1000, 1002, 1004, 1006-1008, 1010, 1013, 1015, 1017, 1018, 1020, 1021, 1023-1025, 1027, 1029-1031, 1033-1035, 1037-1040, 1043, 1046, 1049, 1052, 1053, 1056, 1057, 1059, 1062, 1064, 1065, 1067, 1068, 1070, 1073, 1075, 1077-1080, 1083-1087, 1089, 1090, 1093, 1094, 1097, 1100, 1101, 1103, 1105-1107, 1110-1112, 1114-1117, 1119, 1121, 1125, 1126, 1129, 1132, 1133, or 1135; an amino acid sequence comprising any portion of any of the aforesaid amino acid sequences; an amino acid sequence comprising at least one, two, or three but no more than four modifications, e.g., substitutions (e.g., conservative substitutions), insertions, or deletions, relative to any of the aforesaid amino acid sequences; an amino acid sequence comprising at least one, two, or three but no more than four different amino acids, relative to any one of the aforesaid amino acid sequences.

[1711] In some embodiments, [A][B] is present in loop VIII of the AAV capsid variant. In some embodiments, [C], [D], and/or [E] is present in loop VIII of the AAV capsid variant. In some embodiments, [A] is present immediately subsequent to position 586, relative to a reference sequence numbered according to the amino acid sequence of SEQ ID NO: 138. In some embodiments, [B] is present immediately subsequent to [A]. In some embodiments, [C] is present immediately subsequent to position 588, relative to a reference sequence numbered according to the amino acid sequence of SEQ ID NO: 138. In some embodiments, [D] is present immediately subsequent to position 592, relative to a reference sequence numbered according to the amino acid sequence of SEQ ID NO: 138. In some embodiments, [E] is present immediately subsequent to position 595, relative to a reference sequence numbered according to the amino acid sequence of SEQ ID NO: 138.

[1712] In some embodiments, the AAV capsid polypeptide, e.g., the AAV capsid variant, comprises from N-terminus to C-terminus [A][B]. In some embodiments, the AAV capsid polypeptide, e.g., the AAV capsid variant, comprises from N-terminus to C-terminus [A][B][C]. In some embodiments, the AAV capsid polypeptide, e.g., the AAV capsid variant, comprises from N-terminus to C-terminus [A][B][C][D]. In some embodiments, the AAV capsid polypeptide, e.g., the AAV capsid variant, comprises from N-terminus to C-terminus [A][B][C][D][E].

[1713] In some embodiments, the AAV capsid polypeptide, e.g., the AAV capsid variant, comprises comprising PLNGAVHLY (SEQ ID NO: 3648) and optionally further comprises one, two, or all of an amino acid other than T at position 593 (e.g., A, L, R, V, C, I, K, M, N, P, Q, S), an amino acid other than G at position 594 (e.g., M, S, A, Q, V, T, L, P, H, K, N, I, Y, or R), and/or an amino acid other than W at position 595 (e.g., S, P, T, A, G, L, Q, H, N, R, K, V, E, F, M, C, or Y), relative to a reference sequence numbered according to the amino acid sequence of SEQ ID NO: 138. In some embodiments, the amino acid at position 593, relative to a reference sequence numbered according to the amino acid sequence of SEQ ID NO: 138, is: T, A, L, R, V, C, I, K, M, N, P, Q, or S. In some embodiments, the amino acid at position 594, relative to a reference sequence numbered according to the amino acid sequence of SEQ ID NO: 138, is: G, M, S, A, Q, V, T, L, P, H, K, N, I, Y, or R. In some embodiments, the amino acid at position 595, relative to a reference sequence numbered according to the amino acid sequence of SEQ ID NO: 138: W, S, P, T, A, G, L, Q, H, N, R, K, V, E, F, M, C, or Y. In some embodiments, the AAV capsid variant comprises the amino acid sequence of PLNGAVHLY (SEQ ID NO: 3648) and further comprises the amino acid at position 593, relative to a reference sequence numbered according to the amino acid sequence of SEQ ID NO: 138, is: T, A, L, R, V, C, I, K, M, N, P, Q, or S; the amino acid at position 594, relative to a reference sequence numbered according to the amino acid sequence of SEQ ID NO: 138, is: G, M, S, A, Q, V, T, L, P, H, K, N, I, Y, or R; and/or the amino acid at position 595, relative to a reference sequence numbered according to the amino acid sequence of SEQ ID NO: 138: W, S, P, T, A, G, L, Q, H, N, R, K, V, E, F, M, C, or Y. In some embodiments, the amino acids at positions 593-595, relative to a reference sequence numbered according to the amino acid sequence of SEQ ID NO: 138, does not comprise the amino acid sequence of TGW. In some embodiments, the amino acid sequence of PLNGAVHLY (SEQ ID NO: 3648) is present in loop VIII of the AAV capsid variant. In some embodiments, the amino acid sequence of PLNGAVHLY (SEQ ID NO: 3648) is present immediately subsequent to position 586, relative to a reference sequence numbered according to the amino acid sequence of SEQ ID NO: 138.

[1714] In some embodiments, the AAV capsid polypeptide, e.g., the AAV capsid variant, comprises at least 3, 4, 5, 6, 7, 8, 9, 10, 11, 12, 13, 14, 15, 16, 17, or 18 consecutive amino acids from any one of SEQ ID NOs: 139-1138. In some embodiments, the AAV capsid polypeptide, e.g., the AAV capsid variant, comprises at least 3, 4, 5, 6, 7, 8, 9, 10, 11, 12, 13, 14, 15, 16, 17, or 18 consecutive amino acids from any one of SEQ ID NOs: 139-476. In some embodiments, the AAV capsid polypeptide, e.g., the AAV capsid variant, comprises at least 3, 4, 5, 6, 7, 8, 9, 10, 11, 12, 13, 14, 15, 16, 17, or 18 consecutive amino acids from any one of the amino acid sequences provided in Table 1B. In some embodiments, the AAV capsid polypeptide, e.g., the AAV capsid variant, comprises at least 3, 4, 5, 6, 7, 8, 9, 10, 11, 12, 13, 14, 15, 16, 17, or 18 consecutive amino acids from any one of the amino acid sequences provided in Table 11. In some embodiments, the AAV capsid polypeptide, e.g., the AAV capsid variant, comprises at least 3, 4, 5, 6, 7, 8, 9, 10, 11, 12, 13, 14, 15, 16, 17, or 18 consecutive amino acids from any one of the amino acid sequences provided in Table 20.

[1715] In some embodiments, the AAV capsid variant comprises an amino sequence comprising at least one, two, or three but no more than four modifications, e.g., substitutions (e.g., conservative substitutions), insertions, or deletions, relative to the amino acid sequence of any one of SEQ ID NOs: 139-1138. In some embodiments, the AAV capsid variant comprises an amino sequence comprising at least one, two, or three but no more than four different amino acids, relative to the amino acid sequence of any one of SEQ ID NOs: 139-1138.

[1716] In some embodiments, the AAV capsid polypeptide, e.g., the AAV capsid variant, comprises an amino sequence comprising at least one, two, or three but no more than four modifications, e.g., substitutions (e.g., conservative substitutions), insertions, or deletions, relative to the amino acid sequence of any one of SEQ ID NOs: 139-476. In some embodiments, the AAV capsid variant comprises an amino sequence comprising at least one, two, or three but no more than four different amino acids, relative to the amino acid sequence of any one of SEQ ID NOs: 139-476.

[1717] In some embodiments, the AAV capsid polypeptide, e.g., the AAV capsid variant, comprises an amino sequence comprising at least one, two, or three but no more than four modifications, e.g., substitutions (e.g., conservative substitutions), insertions, or deletions, relative to any one of the amino acid sequences in Table 1B. In some embodiments, the AAV capsid variant comprises an amino sequence comprising at least one, two, or three but no more than four different amino acids, relative to any one of the amino acid sequences in Table 1B.

[1718] In some embodiments, the AAV capsid polypeptide, e.g., the AAV capsid variant, comprises an amino sequence comprising at least one, two, or three but no more than four modifications, e.g., substitutions (e.g., conservative substitutions), insertions, or deletions, relative to the amino acid sequence of any one of SEQ ID NOs: 1139-1172. In some embodiments, the AAV capsid variant comprises an amino sequence comprising at least one, two, or three but no more than four different amino acids, relative to the amino acid sequence of any one of SEQ ID NOs: 1139-1172.

[1719] In some embodiments, the amino acid sequence is present in loop VIII of the AAV capsid variant. In some embodiments, the amino acid sequence is present immediately subsequent to position 586, 587, 588, 589, 590, 591, 592, 593, 594, or 595, relative to a reference sequence numbered according to the amino acid sequence of SEQ ID NO: 138. In some embodiments, the amino acid sequence is present immediately subsequent to position 586, relative to a reference sequence numbered according to the amino acid sequence of SEQ ID NO: 138. In some embodiments, the amino acid sequence is present immediately subsequent to position 588, relative to a reference sequence numbered according to the amino acid sequence of SEQ ID NO: 138. In some embodiments, the amino acid sequence is present immediately subsequent to position 592, relative to a reference sequence numbered according to the amino acid sequence of SEQ ID NO: 138. In some embodiments, the amino acid sequence is present immediately subsequent to position 595, relative to a reference sequence numbered according to the amino acid sequence of SEQ ID NO: 138.

[1720] In some embodiments, the AAV capsid polypeptide, e.g., the AAV capsid variant, comprises at least 3, 4, 5, 6, 7, 8, or 9 consecutive amino acids from the amino acid sequence of any of SEQ ID NO: 1725-3622. In some embodiments, the AAV capsid variant comprises at least 3, 4, 5, 6, 7, 8, or 9 consecutive amino acids from the amino acid sequence of any of SEQ ID NO: 3648-3659. In some embodiments, the amino acid sequence is present in loop VIII. In some embodiments, the amino acid sequence is present immediately subsequent to position 586, 588, or 589, relative to a reference sequence numbered according to the amino acid sequence of SEQ ID NO: 138.

[1721] In some embodiments, the 3 consecutive amino acids comprise PLN. In some embodiments, the 4 consecutive amino acids comprise PLNG (SEQ ID NO: 3678). In some embodiments, the 5 consecutive amino acids comprise PLNGA (SEQ ID NO: 3679). In some embodiments, the 6 consecutive amino acids comprise PLNGAV (SEQ ID NO: 3680). In some embodiments, the 7 consecutive amino acids comprise PLNGAVH (SEQ ID NO: 3681). In some embodiments, the 8 consecutive amino acids comprise PLNGAVHL (SEQ ID NO: 3682). In some embodiments, the 9 consecutive amino acids comprise PLNGAVHLY (SEQ ID NO: 3648).

[1722] In some embodiments, the 3 consecutive amino acids comprise YST. In some embodiments, the 4 consecutive amino acids comprise YSTD (SEQ ID NO: 3690). In some embodiments, the 5 consecutive amino acids comprise YSTDE (SEQ ID NO: 3691). In some embodiments, the 5 consecutive amino acids comprise YSTDV (SEQ ID NO: 3700). In some embodiments, the 6 consecutive amino acids comprise YSTDER (SEQ ID NO: 3692). In some embodiments, the 6 consecutive amino acids comprise YSTDVR (SEQ ID NO: 3701). In some embodiments, the 7 consecutive amino acids comprise YSTDERM (SEQ ID NO: 3657). In some embodiments, the 7 consecutive amino acids comprise YSTDERK (SEQ ID NO: 3658). In some embodiments, the 7 consecutive amino acids comprise YSTDVRM (SEQ ID NO: 3650).

[1723] In some embodiments, the 3 consecutive amino acids comprise IVM. In some embodiments, the 4 consecutive amino acids comprise IVMN (SEQ ID NO: 3693). In some embodiments, the 5 consecutive amino acids comprise IVMNS (SEQ ID NO: 3694). In some embodiments, the 6 consecutive amino acids comprise IVMNSL (SEQ ID NO: 3695). In some embodiments, the 7 consecutive amino acids comprise IVMNSLK (SEQ ID NO: 3651).

[1724] In some embodiments, the AAV capsid polypeptide, e.g., the AAV capsid variant, comprises an amino acid sequence comprising at least one, two, or three but no more than four modifications, e.g., substitutions, (e.g., conservative substitutions), insertions, or deletions, relative to the amino acid sequence of any of SEQ ID NO: 1725-3622. In some embodiments, the AAV capsid polypeptide, e.g., the AAV capsid variant, comprises an amino acid sequence comprising at least one, two, or three but no more than four different amino acids, relative to the amino acid sequence of any of SEQ ID NO: 1725-3622. In some embodiments, the AAV capsid variant comprises an amino acid sequence comprising at least one, two, or three but no more than four modifications, e.g., substitutions, (e.g., conservative substitutions), insertions, or deletions, relative to the amino acid sequence of any of SEQ ID NO: 3648-3659. In some embodiments, the AAV capsid variant comprises an amino acid sequence comprising at least one, two, or three but no more than four different amino acids relative to the amino acid sequence of any of SEQ ID NO: 3648-3659. In some embodiments, the amino acid sequence is present in loop VIII. In some embodiments, the amino acid sequence is present immediately subsequent to position 586, 588, or 589, relative to a reference sequence numbered according to the amino acid sequence of SEQ ID NO: 138.

[1725] In some embodiments, the AAV capsid polypeptide, e.g., the AAV capsid variant, comprises the amino acid sequence of PLNGAVHLY (SEQ ID NO: 3648), an amino acid sequence comprising at least one, two, or three but no more than four modifications, e.g., substitutions (e.g., conservative substitutions), insertions, or deletions, relative to the amino acid sequence of PLNGAVHLY (SEQ ID NO: 3648), or an amino acid sequence comprising at least one, two, or three but no more than four different amino acids relative to the amino acid sequence of PLNGAVHLY (SEQ ID NO: 3648), optionally wherein position 7 is H.

[1726] In some embodiments, the AAV capsid polypeptide, e.g., the AAV capsid variant, comprises the amino acid sequence of any of SEQ ID NO: 1725-3622. In some embodiments, the AAV capsid variant comprises the amino acid sequence of any of SEQ ID NO: 3648-3659. In some embodiments, the amino acid sequence is present in loop VIII of an AAV capsid variant described herein. In some embodiments, the amino acid sequence is present immediately subsequent to position 586, relative to a reference sequence numbered according to the amino acid sequence of SEQ ID NO: 138. In some embodiments, the amino acid sequence is present immediately subsequent to position 588, relative to a reference sequence numbered according to the amino acid sequence of SEQ ID NO: 138. In some embodiments, the amino acid sequence is present immediately subsequent to position 589, relative to a reference sequence numbered according to the amino acid sequence of SEQ ID NO: 138.

[1727] In some embodiments, the AAV capsid polypeptide, e.g., the AAV capsid variant (e.g., an AAV capsid variant described herein), comprises an amino acid sequence encoded by the nucleotide sequence of any one of SEQ ID NOs: 3660-3671, or a nucleotide sequence substantially identical (e.g., having at least 70%, 75%, 80%, 85%, 90%, 92%, 95%, 97%, 98%, or 99% sequence identity) thereto. In some embodiments, the AAV capsid, e.g., an AAV capsid variant described herein, comprises an amino acid sequence encoded by a nucleotide sequence comprising at least one, two, three, four, five, six, or seven modifications, e.g., substitutions (e.g., conservative substitutions), insertions, or deletions, but no more than ten modifications, e.g., substitutions (e.g., conservative substitutions), insertions, or deletions, relative to the nucleotide sequences of any of SEQ ID NOs: 3660-3671. In some embodiments, the AAV capsid polypeptide, e.g., the AAV capsid variant (e.g., an AAV capsid variant described herein), comprises an amino acid sequence encoded by a nucleotide sequence comprising at least one, two, three, four, five, six, or seven, but no more than ten different nucleotides relative to the nucleotide sequence of any of SEQ ID NOs: 3660-3671.

[1728] In some embodiments, the nucleotide sequence encoding the AAV capsid polypeptide, e.g., the AAV capsid variant (e.g., an AAV capsid variant described herein), comprises the nucleotide sequence of any one of SEQ ID NOs: 3660-3671, or a nucleotide sequence substantially identical (e.g., having at least 70%, 75%, 80%, 85%, 90%, 92%, 95%, 97%, 98%, or 99% sequence identity) thereto. In some embodiments, nucleic acid sequence encoding the AAV capsid variant, e.g., an AAV capsid variant described herein, comprises a nucleotide sequence comprising at least one, two, three, four, five, six, or seven modifications, e.g., substitutions (e.g., conservative substitutions), insertions, or deletions, but no more than ten modifications, e.g., substitutions (e.g., conservative substitutions), insertions, or deletions, of the nucleotide sequences relative to any of SEQ ID NOs: 3660-3671. In some embodiments, the nucleotide sequence encoding the AAV capsid polypeptide, e.g., the AAV capsid variant (e.g., an AAV capsid variant described herein), comprises a nucleotide sequence comprising at least one, two, three, four, five, six, or seven, but no more than ten different nucleotides relative to the nucleotide sequence of any of SEQ ID NOs: 3660-3671.

[1729] In some embodiments, the nucleotide sequence encoding the AAV capsid polypeptide, e.g., the AAV capsid variant (e.g., an AAV capsid variant described herein), comprises the nucleotide sequence of SEQ ID NO: 3660, or a nucleotide sequence substantially identical (e.g., having at least 70%, 75%, 80%, 85%, 90%, 92%, 95%, 97%, 98%, or 99% sequence identity) thereto. In some embodiments, the nucleic acid sequence encoding the AAV capsid variant comprises a nucleotide sequence comprising at least one, two, three, four, five, six, or seven modifications, e.g., substitutions (e.g., conservative substitutions), insertions, or deletions, but no more than ten modifications, e.g., substitutions (e.g., conservative substitutions), insertions, or deletions, relative to the nucleotide sequences of SEQ ID NO: 3660. In some embodiments, the nucleotide sequence encoding the AAV capsid polypeptide, e.g., the AAV capsid variant (e.g., an AAV capsid variant described herein), comprises a nucleotide sequence comprising at least one, two, three, four, five, six, or seven, but no more than ten different nucleotides relative to the nucleotide sequence of SEQ ID NO: 3660.

[1730] In some embodiments, the nucleotide sequence encoding the AAV capsid polypeptide, e.g., the AAV capsid variant (e.g., an AAV capsid variant described herein), comprises the nucleotide sequence of SEQ ID NO: 3663, or a nucleotide sequence substantially identical (e.g., having at least 70%, 75%, 80%, 85%, 90%, 92%, 95%, 97%, 98%, or 99% sequence identity) thereto. In some embodiments, the nucleic acid sequence encoding the AAV capsid variant comprises a nucleotide sequence comprising at least one, two, three, four, five, six, or seven modifications, e.g., substitutions (e.g., conservative substitutions), insertions, or deletions, but no more than ten modifications, e.g., substitutions (e.g., conservative substitutions), insertions, or deletions, of the nucleotide sequences relative to SEQ ID NO: 3663. In some embodiments, the nucleotide sequence encoding the AAV capsid polypeptide, e.g., the AAV capsid variant (e.g., an AAV capsid variant described herein), comprises a nucleotide sequence comprising at least one, two, three, four, five, six, or seven, but no more than ten different nucleotides relative to the nucleotide sequence of SEQ ID NO: 3663.

[1731] In some embodiments, the AAV capsid polypeptide, e.g., the AAV capsid variant, comprises the amino acid P at position 587 and the amino acid L at position 588, and further comprises the amino acid sequence NGAVHLY (SEQ ID NO: 3689) immediately subsequent to position 588, numbered according to SEQ ID NO: 138. In some embodiments, the AAV capsid variant comprises the amino acid L at position 593, the amino acid S at position 594, and/or the amino acid P at position 595, numbered according to SEQ ID NO: 138. In some embodiments, the AAV capsid polypeptide further comprises the amino acid K at position 597, numbered according to SEQ ID NO: 138. In some embodiments, the AAV capsid polypeptide further comprises the amino acid P at position 597, numbered according to SEQ ID NO: 138.

[1732] In some embodiments, the AAV capsid polypeptide, e.g., the AAV capsid variant, comprises an amino acid residue other than “A” at position 587 and/or an amino acid residue other than “Q” at position 588, numbered according to SEQ ID NO: 138. In some embodiments, the AAV capsid polypeptide, e.g., the AAV capsid variant, comprises one, two, three, or all of an amino acid other than A at position 589, an amino acid other than Q at position 590, an amino acid other than A at position 591, and/or an amino acid other than Q at position 592, relative to a reference sequence numbered according to the amino acid sequence of SEQ ID NO: 138. In some embodiments, the AAV capsid polypeptide, e.g., the AAV capsid variant, comprises one, two, or all of an amino acid other than T at position 593, an amino acid other than G at position 594, and/or an amino acid other than W at position 595, relative to a reference sequence numbered according to the amino acid sequence of SEQ ID NO: 138. In some embodiments, the AAV capsid polypeptide, e.g., the AAV capsid variant, comprises one, two, or all of an amino acid other than V at position 596, an amino acid other than Q at position 597, and/or an amino acid other than N at position 598, relative to a reference sequence numbered according to the amino acid sequence of SEQ ID NO: 138.

[1733] In some embodiments, the AAV capsid polypeptide, e.g., the AAV capsid variant, comprises an amino acid other than T at position 593, an amino acid other than G at position 594, and/or an amino acid other than W at position 595, numbered according to SEQ ID NO: 138. In some embodiments, the AAV capsid variant comprises the amino acid L at position 593, the amino acid S at position 594, and/or the amino acid P at position 595, numbered according to SEQ ID NO: 138.

[1734] In some embodiments, the AAV capsid polypeptide, e.g., the AAV capsid variant, comprises an amino acid other than Q at position 597, numbered according to the amino acid sequence of SEQ ID NO: 138. In some embodiments, the AAV capsid variant comprises the amino acid P at position 597, numbered according to the amino acid sequence of SEQ ID NO: 138. In some embodiments, the AAV capsid variant comprises the amino acid K at position 597, numbered according to the amino acid sequence of SEQ ID NO: 138.

[1735] In some embodiments, the AAV capsid polypeptide, e.g., the AAV capsid variant, comprises the amino acid sequence of PLNGAVHLY (SEQ ID NO: 3648) wherein the amino acid sequence of PLNGAVHLY (SEQ ID NO: 3648) is present immediately subsequent to position 586, relative to a reference sequence numbered according to the amino acid sequence of SEQ ID NO: 138.

[1736] In some embodiments, the polypeptide, e.g., the AAV capsid variant, comprises the amino acid sequence of GGTLAVVSL (SEQ ID NO: 3654), wherein the amino acid sequence of GGTLAVVSL (SEQ ID NO: 3654) is present immediately subsequent to position 586, relative to a reference sequence numbered according to the amino acid sequence of SEQ ID NO: 138.

[1737] In some embodiments, the AAV capsid polypeptide, e.g., the AAV capsid variant, comprises the amino acid sequence of IVMNSLK (SEQ ID NO: 3651), wherein the amino acid sequence of IVMNSLK (SEQ ID NO: 3651) is present immediately subsequent to position 588, relative to a reference sequence numbered according to the amino acid sequence of SEQ ID NO: 138.

[1738] In some embodiments, the AAV capsid polypeptide, e.g., the AAV capsid variant, comprises the amino acid sequence of any of SEQ ID NOs: 3649, 3650, 3652, 3653, or 3655-3659, wherein the amino acid sequence of any of the aforesaid sequences is present immediately subsequent to position 589, relative to a reference sequence numbered according to the amino acid sequence of SEQ ID NO: 138.

[1739] In some embodiments, the AAV capsid polypeptide, e.g., the AAV capsid variant, further comprises a substitution at position K449, e.g., a K449R substitution, numbered according to SEQ ID NO: 138. In some embodiments, the AAV capsid variant further comprises a modification, e.g., an insertion, substitution, and/or deletion in loop I, II, IV, and/or VI.

[1740] In some embodiments, the AAV capsid polypeptide, e.g., the AAV capsid variant, further comprises an amino acid sequence comprising at least one, two or three modifications, e.g., substitutions (e.g., conservative substitutions), insertions or deletions, but not more than 30, 20 or 10 modifications relative to the amino acid sequence of SEQ ID NO: 138. In some embodiments, the AAV capsid polypeptide, e.g., the AAV capsid variant, further comprises an amino acid sequence having at least one, two or three but no more than 30, 20, or 10 different amino acids relative to the amino acid sequence of SEQ ID NO: 138. In some embodiments, the AAV capsid variant further comprises the amino acid sequence of SEQ ID NO: 138, or an amino acid sequence with at least 80% (e.g., at least about 85, 90, 95, 96, 97, 98, or 99%) sequence identity thereto. In some embodiments, the AAV capsid variant further comprises an amino acid sequence encoded by the nucleotide sequence of SEQ ID NO: 137, or a sequence with at least 80% (e.g., at least about 85, 90, 95, 96, 97, 98, or 99%) sequence identity thereto.

[1741] In some embodiments, an AAV capsid polypeptide, e.g., an AAV capsid variant, of the present disclosure comprises an amino acid sequence as described herein, e.g., an amino acid sequence of an AAV capsid variant chosen from TTD-001, TTD-002, TTD-003, TTD-004, TTD-005, TTD-006, TTD-007, TTD-008, TTD-009, TTD-010, TTD-011, TTD-012, TTD-013, or TTD-014, e.g., as described in Tables 3 and 4.

[1742] In some embodiments, an AAV capsid polypeptide, e.g. the AAV capsid variant, comprises a VP1, VP2, and/or VP3 protein comprising an amino acid sequence described herein, e.g., an amino acid sequence of an AAV capsid variant chosen from TTD-001, TTD-002, TTD-003, TTD-004, TTD-005, TTD-006, TTD-007, TTD-008, TTD-009, TTD-010, TTD-011, TTD-012, TTD-013, or TTD-014, e.g., as described in Tables 3 and 4.

[1743] In some embodiments, an AAV capsid polypeptide, e.g., the AAV capsid variant, comprises an amino acid sequence encoded by a nucleotide sequence as described herein, e.g., a nucleotide sequence of an AAV capsid variant chosen from TTD-001, TTD-002, TTD-003, TTD-004, TTD-005, TTD-006, TTD-007, TTD-008, TTD-009, TTD-010, TTD-011, TTD-012, TTD-013, or TTD-014, e.g., as described in Tables 3 and 5.

[1744] In some embodiments, a polynucleotide encoding an AAV capsid polypeptide, e.g., an AAV capsid variant, of the present disclosure comprises a nucleotide sequence described herein, e.g., a nucleotide sequence of an AAV capsid variant chosen from TTD-001, TTD-002, TTD-003, TTD-004, TTD-005, TTD-006, TTD-007, TTD-008, TTD-009, TTD-010, TTD-011, TTD-012, TTD-013, or TTD-014, e.g., as described in Tables 3 and 5.

TABLE 3
Exemplary full length capsid sequences

| | VP1 DNA | VP1 PRT | Peptide PRT | Peptide DNA |
|---|---|---|---|---|
| Serotype | SEQ ID NO: | SEQ ID NO: | SEQ ID NO: | SEQ ID NO: |
| TTD-001 | 3623 | 3636 | 1725 or 3648 | 3660 |
| TTD-002 | 3624 or 3625 | 3637 | 1726 or 3649 | 3661 |
| TTD-003 | 3626 | 3638 | 1729 or 3650 | 3662 |
| TTD-004 | 3627 | 3639 | 1760 or 3651 | 3663 |
| TTD-005 | 3628 | 3640 | 1769 or 3652 | 3664 |
| TTD-006 | 3629 | 3641 | 3622 or 3653 | 3665 |
| TTD-007 | 3630 | 3642 | 1798 or 3654 | 3666 |
| TTD-008 | 3631 | 3643 | 1785 or 3655 | 3667 |
| TTD-009 | 3632 | 3644 | 1767 or 3656 | 3668 |
| TTD-010 | 3633 | 3645 | 1734 or 3657 | 3669 |
| TTD-011 | 3634 | 3646 | 1737 or 3658 | 3670 |
| TTD-012 | 3635 | 3647 | 1819 or 3659 | 3671 |
| TTD-013 | 4 | 5 | 314 | 6 |
| TTD-014 | 7 | 8 | 566 | 9 |

TABLE 4
Exemplary full length capsid amino acid sequences

| | SEQ | |
|---|---|---|
| Name and | ID | |
| Annotation | NO: | Amino Acid Sequence |
| TTD-001 | 3636 | MAADGYLPDWLEDNLSEGIREWWALKPGAPQPKANQQHQDNARGLVLPG |
| 9 mer peptide | | YKYLGPGNGLDKGEPVNAADAAALEHDKAYDQQLKAGDNPYLKYNHADA |
| underlined, starts at | | EFQERLKEDTSFGGNLGRAVFQAKKRLLEPLGLVEEAAKTAPGKKRPVE |
| position 587 | | QSPQEPDSSAGIGKSGAQPAKKRLNFGQTGDTESVPDPQPIGEPPAAPS |
| (immediately | | GVGSLTMASGGGAPVADNNEGADGVGSSSGNWHCDSQWLGDRVITTSTR |
| subsequent to | | TWALPTYNNHLYKQISNSTSGGSSNDNAYFGYSTPWGYFDFNRFHCHFS |
| position 586); | | PRDWQRLINNNWGFRPKRLNFKLFNIQVKEVTDNNGVKTIANNLTSTVQ |
| 743 aa | | VFTDSDYQLPYVLGSAHEGCLPPFPADVFMIPQYGYLTLNDGSQAVGRS |
| | | SFYCLEYFPSQMLRTGNNFQFSYEFENVPFHSSYAHSQSLDRLMNPLID |
| | | QYLYYLSKTINGSGQNQQTLKFSVAGPSNMAVQGRNYIPGPSYRQQRVS |
| | | TTVTQNNNSEFAWPGASSWALNGRNSLMNPGPAMASHKEGEDRFFPLSG |
| | | SLIFGKQGTGRDNVDADKVMITNEEEIKTTNPVATESYGQVATNHQSPL |
| | | NGAVHLYAQAQTGWVQNQGILPGMVWQDRDVYLQGPIWAKIPHTDGNFH |
| | | PSPLMGGFGMKHPPPQILIKNTPVPADPPTAFNKDKLNSFITQYSTGQV |
| | | SVEIEWELQKENSKRWNPEIQYTSNYYKSNNVEFAVNTEGVYSEPRPIG |
| | | TRYLTRNL |
| TTD-002 | 3637 | MAADGYLPDWLEDNLSEGIREWWALKPGAPQPKANQQHQDNARGLVLPG |
| 7 mer peptide | | YKYLGPGNGLDKGEPVNAADAAALEHDKAYDQQLKAGDNPYLKYNHADA |
| underlined, starts at | | EFQERLKEDTSFGGNLGRAVFQAKKRLLEPLGLVEEAAKTAPGKKRPVE |
| position 590 | | QSPQEPDSSAGIGKSGAQPAKKRLNFGQTGDTESVPDPQPIGEPPAAPS |
| (immediately | | GVGSLTMASGGGAPVADNNEGADGVGSSSGNWHCDSQWLGDRVITTSTR |
| subsequent to | | TWALPTYNNHLYKQISNSTSGGSSNDNAYFGYSTPWGYFDFNRFHCHFS |
| position 589); | | PRDWQRLINNNWGFRPKRLNFKLFNIQVKEVTDNNGVKTIANNLTSTVQ |
| 743 aa | | VFTDSDYQLPYVLGSAHEGCLPPFPADVFMIPQYGYLTLNDGSQAVGRS |
| | | SFYCLEYFPSQMLRTGNNFQFSYEFENVPFHSSYAHSQSLDRLMNPLID |
| | | QYLYYLSKTINGSGQNQQTLKFSVAGPSNMAVQGRNYIPGPSYRQQRVS |
| | | TTVTQNNNSEFAWPGASSWALNGRNSLMNPGPAMASHKEGEDRFFPLSG |
| | | SLIFGKQGTGRDNVDADKVMITNEEEIKTTNPVATESYGQVATNHQSAQ |
| | | ARDSPKGWQAQTGWVQNQGILPGMVWQDRDVYLQGPIWAKIPHTDGNFH |
| | | PSPLMGGFGMKHPPPQILIKNTPVPADPPTAFNKDKLNSFITQYSTGQV |
| | | SVEIEWELQKENSKRWNPEIQYTSNYYKSNNVEFAVNTEGVYSEPRPIG |
| | | TRYLTRNL |
| TTD-003 | 3638 | MAADGYLPDWLEDNLSEGIREWWALKPGAPQPKANQQHQDNARGLVLPG |
| 7 mer peptide | | YKYLGPGNGLDKGEPVNAADAAALEHDKAYDQQLKAGDNPYLKYNHADA |
| underlined, starts at | | EFQERLKEDTSFGGNLGRAVFQAKKRLLEPLGLVEEAAKTAPGKKRPVE |
| position 590 | | QSPQEPDSSAGIGKSGAQPAKKRLNFGQTGDTESVPDPQPIGEPPAAPS |
| (immediately | | GVGSLTMASGGGAPVADNNEGADGVGSSSGNWHCDSQWLGDRVITTSTR |
| subsequent to | | TWALPTYNNHLYKQISNSTSGGSSNDNAYFGYSTPWGYFDFNRFHCHFS |
| position 589); | | PRDWQRLINNNWGFRPKRLNFKLFNIQVKEVTDNNGVKTIANNLTSTVQ |
| 743 aa | | VFTDSDYQLPYVLGSAHEGCLPPFPADVFMIPQYGYLTLNDGSQAVGRS |
| | | SFYCLEYFPSQMLRTGNNFQFSYEFENVPFHSSYAHSQSLDRLMNPLID |
| | | QYLYYLSKTINGSGQNQQTLKFSVAGPSNMAVQGRNYIPGPSYRQQRVS |
| | | TTVTQNNNSEFAWPGASSWALNGRNSLMNPGPAMASHKEGEDRFFPLSG |
| | | SLIFGKQGTGRDNVDADKVMITNEEEIKTTNPVATESYGQVATNHQSAQ |
| | | AYSTDVRMQAQTGWVQNQGILPGMVWQDRDVYLQGPIWAKIPHTDGNFH |
| | | PSPLMGGFGMKHPPPQILIKNTPVPADPPTAFNKDKLNSFITQYSTGQV |
| | | SVEIEWELQKENSKRWNPEIQYTSNYYKSNNVEFAVNTEGVYSEPRPIG |
| | | TRYLTRNL |
| TTD-004 | 3639 | MAADGYLPDWLEDNLSEGIREWWALKPGAPQPKANQQHQDNARGLVLPG |
| 7 mer peptide | | YKYLGPGNGLDKGEPVNAADAAALEHDKAYDQQLKAGDNPYLKYNHADA |
| underlined, starts at | | EFQERLKEDTSFGGNLGRAVFQAKKRLLEPLGLVEEAAKTAPGKKRPVE |
| position 589 | | QSPQEPDSSAGIGKSGAQPAKKRLNFGQTGDTESVPDPQPIGEPPAAPS |
| (immediately | | GVGSLTMASGGGAPVADNNEGADGVGSSSGNWHCDSQWLGDRVITTSTR |
| subsequent to | | TWALPTYNNHLYKQISNSTSGGSSNDNAYFGYSTPWGYFDFNRFHCHFS |
| position 588); | | PRDWQRLINNNWGFRPKRLNFKLFNIQVKEVTDNNGVKTIANNLTSTVQ |
| 743 aa | | VFTDSDYQLPYVLGSAHEGCLPPFPADVFMIPQYGYLTLNDGSQAVGRS |
| | | SFYCLEYFPSQMLRTGNNFQFSYEFENVPFHSSYAHSQSLDRLMNPLID |
| | | QYLYYLSKTINGSGQNQQTLKFSVAGPSNMAVQGRNYIPGPSYRQQRVS |
| | | TTVTQNNNSEFAWPGASSWALNGRNSLMNPGPAMASHKEGEDRFFPLSG |
| | | SLIFGKQGTGRDNVDADKVMITNEEEIKTTNPVATESYGQVATNHQSAQ |
| | | IVMNSLKAQAQTGWVQNQGILPGMVWQDRDVYLQGPIWAKIPHTDGNFH |
| | | PSPLMGGFGMKHPPPQILIKNTPVPADPPTAFNKDKLNSFITQYSTGQV |
| | | SVEIEWELQKENSKRWNPEIQYTSNYYKSNNVEFAVNTEGVYSEPRPIG |
| | | TRYLTRNL |
| TTD-005 | 3640 | MAADGYLPDWLEDNLSEGIREWWALKPGAPQPKANQQHQDNARGLVLPG |
| 7 mer peptide | | YKYLGPGNGLDKGEPVNAADAAALEHDKAYDQQLKAGDNPYLKYNHADA |
| underlined, starts at | | EFQERLKEDTSFGGNLGRAVFQAKKRLLEPLGLVEEAAKTAPGKKRPVE |
| position 590 | | QSPQEPDSSAGIGKSGAQPAKKRLNFGQTGDTESVPDPQPIGEPPAAPS |
| (immediately | | GVGSLTMASGGGAPVADNNEGADGVGSSSGNWHCDSQWLGDRVITTSTR |
| subsequent to | | TWALPTYNNHLYKQISNSTSGGSSNDNAYFGYSTPWGYFDFNRFHCHFS |
| position 589); | | PRDWQRLINNNWGFRPKRLNFKLFNIQVKEVTDNNGVKTIANNLTSTVQ |
| 743 aa | | VFTDSDYQLPYVLGSAHEGCLPPFPADVFMIPQYGYLTLNDGSQAVGRS |
| | | SFYCLEYFPSQMLRTGNNFQFSYEFENVPFHSSYAHSQSLDRLMNPLID |
| | | QYLYYLSKTINGSGQNQQTLKFSVAGPSNMAVQGRNYIPGPSYRQQRVS |
| | | TTVTQNNNSEFAWPGASSWALNGRNSLMNPGPAMASHKEGEDRFFPLSG |
| | | SLIFGKQGTGRDNVDADKVMITNEEEIKTTNPVATESYGQVATNHQSAQ |
| | | ARESPRGLQAQTGWVQNQGILPGMVWQDRDVYLQGPIWAKIPHTDGNFH |
| | | PSPLMGGFGMKHPPPQILIKNTPVPADPPTAFNKDKLNSFITQYSTGQV |
| | | SVEIEWELQKENSKRWNPEIQYTSNYYKSNNVEFAVNTEGVYSEPRPIG |
| | | TRYLTRNL |
| TTD-006 | 3641 | MAADGYLPDWLEDNLSEGIREWWALKPGAPQPKANQQHQDNARGLVLPG |
| 7 mer peptide | | YKYLGPGNGLDKGEPVNAADAAALEHDKAYDQQLKAGDNPYLKYNHADA |
| underlined, starts at | | EFQERLKEDTSFGGNLGRAVFQAKKRLLEPLGLVEEAAKTAPGKKRPVE |
| position 590 | | QSPQEPDSSAGIGKSGAQPAKKRLNFGQTGDTESVPDPQPIGEPPAAPS |
| (immediately | | GVGSLTMASGGGAPVADNNEGADGVGSSSGNWHCDSQWLGDRVITTSTR |
| subsequent to 589); | | TWALPTYNNHLYKQISNSTSGGSSNDNAYFGYSTPWGYFDFNRFHCHFS |
| 743 aa | | PRDWQRLINNNWGFRPKRLNFKLFNIQVKEVTDNNGVKTIANNLTSTVQ |
| | | VFTDSDYQLPYVLGSAHEGCLPPFPADVFMIPQYGYLTLNDGSQAVGRS |
| | | SFYCLEYFPSQMLRTGNNFQFSYEFENVPFHSSYAHSQSLDRLMNPLID |
| | | QYLYYLSKTINGSGQNQQTLKFSVAGPSNMAVQGRNYIPGPSYRQQRVS |
| | | TTVTQNNNSEFAWPGASSWALNGRNSLMNPGPAMASHKEGEDRFFPLSG |
| | | SLIFGKQGTGRDNVDADKVMITNEEEIKTTNPVATESYGQVATNHQSAQ |
| | | ASFNDTRAQAQTGWVQNQGILPGMVWQDRDVYLQGPIWAKIPHTDGNFH |
| | | PSPLMGGFGMKHPPPQILIKNTPVPADPPTAFNKDKLNSFITQYSTGQV |
| | | SVEIEWELQKENSKRWNPEIQYTSNYYKSNNVEFAVNTEGVYSEPRPIG |
| | | TRYLTRNL |
| TTD-007 | 3642 | MAADGYLPDWLEDNLSEGIREWWALKPGAPQPKANQQHQDNARGLVLPG |
| 9 mer peptide | | YKYLGPGNGLDKGEPVNAADAAALEHDKAYDQQLKAGDNPYLKYNHADA |
| underlined, starts at | | EFQERLKEDTSFGGNLGRAVFQAKKRLLEPLGLVEEAAKTAPGKKRPVE |
| position 587 | | QSPQEPDSSAGIGKSGAQPAKKRLNFGQTGDTESVPDPQPIGEPPAAPS |
| (immediately | | GVGSLTMASGGGAPVADNNEGADGVGSSSGNWHCDSQWLGDRVITTSTR |
| subsequent to | | TWALPTYNNHLYKQISNSTSGGSSNDNAYFGYSTPWGYFDFNRFHCHFS |
| position 586); | | PRDWQRLINNNWGFRPKRLNFKLFNIQVKEVTDNNGVKTIANNLTSTVQ |
| 743 aa | | VFTDSDYQLPYVLGSAHEGCLPPFPADVFMIPQYGYLTLNDGSQAVGRS |
| | | SFYCLEYFPSQMLRTGNNFQFSYEFENVPFHSSYAHSQSLDRLMNPLID |
| | | QYLYYLSKTINGSGQNQQTLKFSVAGPSNMAVQGRNYIPGPSYRQQRVS |
| | | TTVTQNNNSEFAWPGASSWALNGRNSLMNPGPAMASHKEGEDRFFPLSG |
| | | SLIFGKQGTGRDNVDADKVMITNEEEIKTTNPVATESYGQVATNHQSGG |
| | | TLAVVSLAQAQTGWVQNQGILPGMVWQDRDVYLQGPIWAKIPHTDGNFH |
| | | PSPLMGGFGMKHPPPQILIKNTPVPADPPTAFNKDKLNSFITQYSTGQV |
| | | SVEIEWELQKENSKRWNPEQYTSNYYKSNNVEFAVNTEGVYSEPRPIG |
| | | TRYLTRNL |
| TTD-008 | 3643 | MAADGYLPDWLEDNLSEGIREWWALKPGAPQPKANQQHQDNARGLVLPG |
| 7 mer peptide | | YKYLGPGNGLDKGEPVNAADAAALEHDKAYDQQLKAGDNPYLKYNHADA |
| underlined, starts at | | EFQERLKEDTSFGGNLGRAVFQAKKRLLEPLGLVEEAAKTAPGKKRPVE |
| position 590 | | QSPQEPDSSAGIGKSGAQPAKKRLNFGQTGDTESVPDPQPIGEPPAAPS |
| (immediately | | GVGSLTMASGGGAPVADNNEGADGVGSSSGNWHCDSQWLGDRVITTSTR |
| subsequent to 589); | | TWALPTYNNHLYKQISNSTSGGSSNDNAYFGYSTPWGYFDFNRFHCHFS |
| 743 aa | | PRDWQRLINNNWGFRPKRLNFKLFNIQVKEVTDNNGVKTIANNLTSTVQ |
| | | VFTDSDYQLPYVLGSAHEGCLPPFPADVFMIPQYGYLTLNDGSQAVGRS |
| | | SFYCLEYFPSQMLRTGNNFQFSYEFENVPFHSSYAHSQSLDRLMNPLID |
| | | QYLYYLSKTINGSGQNQQTLKFSVAGPSNMAVQGRNYIPGPSYRQQRVS |
| | | TTVTQNNNSEFAWPGASSWALNGRNSLMNPGPAMASHKEGEDRFFPLSG |
| | | SLIFGKQGTGRDNVDADKVMITNEEEIKTTNPVATESYGQVATNHQSAQ |
| | | AYGLPKGPQAQTGWVQNQGILPGMVWQDRDVYLQGPIWAKIPHTDGNFH |
| | | PSPLMGGFGMKHPPPQILIKNTPVPADPPTAFNKDKLNSFITQYSTGQV |
| | | SVEIEWELQKENSKRWNPEIQYTSNYYKSNNVEFAVNTEGVYSEPRPIG |
| | | TRYLTRNL |
| TTD-009 | 3644 | MAADGYLPDWLEDNLSEGIREWWALKPGAPQPKANQQHQDNARGLVLPG |
| 7 mer peptide | | YKYLGPGNGLDKGEPVNAADAAALEHDKAYDQQLKAGDNPYLKYNHADA |
| underlined, starts at | | EFQERLKEDTSFGGNLGRAVFQAKKRLLEPLGLVEEAAKTAPGKKRPVE |
| position 590 | | QSPQEPDSSAGIGKSGAQPAKKRLNFGQTGDTESVPDPQPIGEPPAAPS |
| (immediately | | GVGSLTMASGGGAPVADNNEGADGVGSSSGNWHCDSQWLGDRVITTSTR |
| subsequent to 589); | | TWALPTYNNHLYKQISNSTSGGSSNDNAYFGYSTPWGYFDFNRFHCHFS |
| 743 aa | | PRDWQRLINNNWGFRPKRLNFKLFNIQVKEVTDNNGVKTIANNLTSTVQ |
| | | VFTDSDYQLPYVLGSAHEGCLPPFPADVFMIPQYGYLTLNDGSQAVGRS |
| | | SFYCLEYFPSQMLRTGNNFQFSYEFENVPFHSSYAHSQSLDRLMNPLID |
| | | QYLYYLSKTINGSGQNQQTLKFSVAGPSNMAVQGRNYIPGPSYRQQRVS |
| | | TTVTQNNNSEFAWPGASSWALNGRNSLMNPGPAMASHKEGEDRFFPLSG |
| | | SLIFGKQGTGRDNVDADKVMITNEEEIKTTNPVATESYGQVATNHQSAQ |
| | | ASTGTLRLQAQTGWVQNQGILPGMVWQDRDVYLQGPIWAKIPHTDGNFH |
| | | PSPLMGGFGMKHPPPQILIKNTPVPADPPTAFNKDKLNSFITQYSTGQV |
| | | SVEIEWELQKENSKRWNPEIQYTSNYYKSNNVEFAVNTEGVYSEPRPIG |
| | | TRYLTRNL |
| TTD-010 | 3645 | MAADGYLPDWLEDNLSEGIREWWALKPGAPQPKANQQHQDNARGLVLPG |
| 7 mer peptide | | YKYLGPGNGLDKGEPVNAADAAALEHDKAYDQQLKAGDNPYLKYNHADA |
| underlined, starts at | | EFQERLKEDTSFGGNLGRAVFQAKKRLLEPLGLVEEAAKTAPGKKRPVE |
| position 590 | | QSPQEPDSSAGIGKSGAQPAKKRLNFGQTGDTESVPDPQPIGEPPAAPS |
| (immediately | | GVGSLTMASGGGAPVADNNEGADGVGSSSGNWHCDSQWLGDRVITTSTR |
| subsequent to 589); | | TWALPTYNNHLYKQISNSTSGGSSNDNAYFGYSTPWGYFDFNRFHCHFS |
| 743 aa | | PRDWQRLINNNWGFRPKRLNFKLFNIQVKEVTDNNGVKTIANNLTSTVQ |
| | | VFTDSDYQLPYVLGSAHEGCLPPFPADVFMIPQYGYLTLNDGSQAVGRS |
| | | SFYCLEYFPSQMLRTGNNFQFSYEFENVPFHSSYAHSQSLDRLMNPLID |
| | | QYLYYLSKTINGSGQNQQTLKFSVAGPSNMAVQGRNYIPGPSYRQQRVS |
| | | TTVTQNNNSEFAWPGASSWALNGRNSLMNPGPAMASHKEGEDRFFPLSG |
| | | SLIFGKQGTGRDNVDADKVMITNEEEIKTTNPVATESYGQVATNHQSAQ |
| | | AYSTDERMQAQTGWVQNQGILPGMVWQDRDVYLQGPIWAKIPHTDGNFH |
| | | PSPLMGGFGMKHPPPQILIKNTPVPADPPTAFNKDKLNSFITQYSTGQV |
| | | SVEIEWELQKENSKRWNPEIQYTSNYYKSNNVEFAVNTEGVYSEPRPIG |
| | | TRYLTRNL |
| TTD-011 | 3646 | MAADGYLPDWLEDNLSEGIREWWALKPGAPQPKANQQHQDNARGLVLPG |
| 7 mer peptide | | YKYLGPGNGLDKGEPVNAADAAALEHDKAYDQQLKAGDNPYLKYNHADA |
| underlined, starts at | | EFQERLKEDTSFGGNLGRAVFQAKKRLLEPLGLVEEAAKTAPGKKRPVE |
| position 590 | | QSPQEPDSSAGIGKSGAQPAKKRLNFGQTGDTESVPDPQPIGEPPAAPS |
| (immediately | | GVGSLTMASGGGAPVADNNEGADGVGSSSGNWHCDSQWLGDRVITTSTR |
| subsequent to 589); | | TWALPTYNNHLYKQISNSTSGGSSNDNAYFGYSTPWGYFDFNRFHCHFS |
| 743 aa | | PRDWQRLINNNWGFRPKRLNFKLFNIQVKEVTDNNGVKTIANNLTSTVQ |
| | | VFTDSDYQLPYVLGSAHEGCLPPFPADVFMIPQYGYLTLNDGSQAVGRS |
| | | SFYCLEYFPSQMLRTGNNFQFSYEFENVPFHSSYAHSQSLDRLMNPLID |
| | | QYLYYLSKTINGSGQNQQTLKFSVAGPSNMAVQGRNYIPGPSYRQQRVS |
| | | TTVTQNNNSEFAWPGASSWALNGRNSLMNPGPAMASHKEGEDRFFPLSG |
| | | SLIFGKQGTGRDNVDADKVMITNEEEIKTTNPVATESYGQVATNHQSAQ |
| | | AYSTDERKQAQTGWVQNQGILPGMVWQDRDVYLQGPIWAKIPHTDGNFH |
| | | PSPLMGGFGMKHPPPQILIKNTPVPADPPTAFNKDKLNSFITQYSTGQV |
| | | SVEIEWELQKENSKRWNPEIQYTSNYYKSNNVEFAVNTEGVYSEPRPIG |
| | | TRYLTRNL |
| TTD-012 | 3647 | MAADGYLPDWLEDNLSEGIREWWALKPGAPQPKANQQHQDNARGLVLPG |
| 7 mer peptide | | YKYLGPGNGLDKGEPVNAADAAALEHDKAYDQQLKAGDNPYLKYNHADA |
| underlined, starts at | | EFQERLKEDTSFGGNLGRAVFQAKKRLLEPLGLVEEAAKTAPGKKRPVE |
| position 590 | | QSPQEPDSSAGIGKSGAQPAKKRLNFGQTGDTESVPDPQPIGEPPAAPS |
| (immediately | | GVGSLTMASGGGAPVADNNEGADGVGSSSGNWHCDSQWLGDRVITTSTR |
| subsequent to 589); | | TWALPTYNNHLYKQISNSTSGGSSNDNAYFGYSTPWGYFDFNRFHCHFS |
| 743 aa | | PRDWQRLINNNWGFRPKRLNFKLFNIQVKEVTDNNGVKTIANNLTSTVQ |
| | | VFTDSDYQLPYVLGSAHEGCLPPFPADVFMIPQYGYLTLNDGSQAVGRS |
| | | SFYCLEYFPSQMLRTGNNFQFSYEFENVPFHSSYAHSQSLDRLMNPLID |
| | | QYLYYLSKTINGSGQNQQTLKFSVAGPSNMAVQGRNYIPGPSYRQQRVS |
| | | TTVTQNNNSEFAWPGASSWALNGRNSLMNPGPAMASHKEGEDRFFPLSG |
| | | SLIFGKQGTGRDNVDADKVMITNEEEIKTTNPVATESYGQVATNHQSAQ |
| | | AYVSSVKMQAQTGWVQNQGILPGMVWQDRDVYLQGPIWAKIPHTDGNFH |
| | | PSPLMGGFGMKHPPPQILIKNTPVPADPPTAFNKDKLNSFITQYSTGQV |
| | | SVEIEWELQKENSKRWNPEIQYTSNYYKSNNVEFAVNTEGVYSEPRPIG |
| | | TRYLTRNL |
| TTD-013 | 5 | MAADGYLPDWLEDNLSEGIREWWALKPGAPQPKANQQHQDNARGLVLPG |
| 9 mer peptide | | YKYLGPGNGLDKGEPVNAADAAALEHDKAYDQQLKAGDNPYLKYNHADA |
| underlined, starts at | | EFQERLKEDTSFGGNLGRAVFQAKKRLLEPLGLVEEAAKTAPGKKRPVE |
| position 587 | | QSPQEPDSSAGIGKSGAQPAKKRLNFGQTGDTESVPDPQPIGEPPAAPS |
| (immediately | | GVGSLTMASGGGAPVADNNEGADGVGSSSGNWHCDSQWLGDRVITTSTR |
| subsequent to | | TWALPTYNNHLYKQISNSTSGGSSNDNAYFGYSTPWGYFDFNRFHCHFS |
| position 586); | | PRDWQRLINNNWGFRPKRLNFKLFNIQVKEVTDNNGVKTIANNLTSTVQ |
| modification at | | VFTDSDYQLPYVLGSAHEGCLPPFPADVFMIPQYGYLTLNDGSQAVGRS |
| position 604; | | SFYCLEYFPSQMLRTGNNFQFSYEFENVPFHSSYAHSQSLDRLMNPLID |
| 743 aa | | QYLYYLSKTINGSGQNQQTLKFSVAGPSNMAVQGRNYIPGPSYRQQRVS |
| | | TTVTQNNNSEFAWPGASSWALNGRNSLMNPGPAMASHKEGEDRFFPLSG |
| | | SLIFGKQGTGRDNVDADKVMITNEEEIKTTNPVATESYGQVATNHQSPL |
| | | NGAVHLYAQAQTGWVPNQGILPGMVWQDRDVYLQGPIWAKIPHTDGNFH |
| | | PSPLMGGFGMKHPPPQILIKNTPVPADPPTAFNKDKLNSFITQYSTGQV |
| | | SVEIEWELQKENSKRWNPEIQYTSNYYKSNNVEFAVNTEGVYSEPRPIG |
| | | TRYLTRNL |
| TTD-014 | 8 | MAADGYLPDWLEDNLSEGIREWWALKPGAPQPKANQQHQDNARGLVLPG |
| 9 mer peptide | | YKYLGPGNGLDKGEPVNAADAAALEHDKAYDQQLKAGDNPYLKYNHADA |
| underlined, starts at | | EFQERLKEDTSFGGNLGRAVFQAKKRLLEPLGLVEEAAKTAPGKKRPVE |
| position 587 | | QSPQEPDSSAGIGKSGAQPAKKRLNFGQTGDTESVPDPQPIGEPPAAPS |
| (immediately | | GVGSLTMASGGGAPVADNNEGADGVGSSSGNWHCDSQWLGDRVITTSTR |
| subsequent to | | TWALPTYNNHLYKQISNSTSGGSSNDNAYFGYSTPWGYFDFNRFHCHFS |
| position 586); | | PRDWQRLINNNWGFRPKRLNFKLFNIQVKEVTDNNGVKTIANNLTSTVQ |
| modifications at | | VFTDSDYQLPYVLGSAHEGCLPPFPADVFMIPQYGYLTLNDGSQAVGRS |
| positions 600, 601, | | SFYCLEYFPSQMLRTGNNFQFSYEFENVPFHSSYAHSQSLDRLMNPLID |
| 602, and 604; | | QYLYYLSKTINGSGQNQQTLKFSVAGPSNMAVQGRNYIPGPSYRQQRVS |
| 743 aa | | TTVTQNNNSEFAWPGASSWALNGRNSLMNPGPAMASHKEGEDRFFPLSG |
| | | SLIFGKQGTGRDNVDADKVMITNEEEIKTTNPVATESYGQVATNHQSPL |
| | | NGAVHLYAQAQLSPVKNQGILPGMVWQDRDVYLQGPIWAKIPHTDGNFH |
| | | PSPLMGGFGMKHPPPQILIKNTPVPADPPTAFNKDKLNSFITQYSTGQV |
| | | SVEIEWELQKENSKRWNPEIQYTSNYYKSNNVEFAVNTEGVYSEPRPIG |
| | | TRYLTRNL |

TABLE 5
Exemplary full length capsid nucleic acid sequences

| | SEQ | |
|---|---|---|
| Name and | ID | |
| Annotation | NO: | NT Sequence |
| TTD-001 | 3623 | atggctgccgatggttatcttccagattggctcgaggacaaccttagtgaaggaattcgcga |
| 9 mer | | gtggtgggctttgaaacctggagcccctcaacccaaggcaaatcaacaacatcaagacaacg |
| peptide | | ctcgaggtcttgtgcttccgggttacaaataccttggacccggcaacggactcgacaagggg |
| underlined | | gagccggtcaacgcagcagacgcggcggccctcgagcacgacaaggcctacgaccagcagct |
| | | caaggccggagacaacccgtacctcaagtacaaccacgccgacgccgagttccaggagcggc |
| | | tcaaagaagatacgtcttttgggggcaacctcgggcgagcagtcttccaggccaaaaagagg |
| | | cttcttgaacctcttggtctggttgaggaagcggctaagacggctcctggaaagaagaggcc |
| | | tgtagagcagtctcctcaggaaccggactcctccgcgggtattggcaaatcgggtgcacagc |
| | | ccgctaaaaagagactcaatttcggtcagactggcgacacagagtcagtcccagaccctcaa |
| | | ccaatcggagaacctcccgcagccccctcaggtgtgggatctcttacaatggcttcaggtgg |
| | | tggcgcaccagtggcagacaataacgaaggtgccgatggagtgggtagttcctcgggaaatt |
| | | ggcattgcgattcccaatggctgggggacagagtcatcaccaccagcacccgaacctgggcc |
| | | ctgcccacctacaacaatcacctctacaagcaaatctccaacagcacatctggaggatcttc |
| | | aaatgacaacgcctacttcggctacagcaccccctgggggtattttgacttcaacagattcc |
| | | actgccacttctcaccacgtgactggcagcgactcatcaacaacaactggggattccggcct |
| | | aagcgactcaacttcaagctcttcaacattcaggtcaaagaggttacggacaacaatggagt |
| | | caagaccatcgccaataaccttaccagcacggtccaggtcttcacggactcagactatcagc |
| | | tcccgtacgtgctcgggtcggctcacgagggctgcctcccgccgttcccagcggacgttttc |
| | | atgattcctcagtacgggtatctgacgcttaatgatggaagccaggccgtgggtcgttcgtc |
| | | cttttactgcctggaatatttcccgtcgcaaatgctaagaacgggtaacaacttccagttca |
| | | gctacgagtttgagaacgtacctttccatagcagctacgctcacagccaaagcctggaccga |
| | | ctaatgaatccactcatcgaccaatacttgtactatctctcaaagactattaacggttctgg |
| | | acagaatcaacaaacgctaaaattcagtgtggccggacccagcaacatggctgtccagggaa |
| | | gaaactacatacctggacccagctaccgacaacaacgtgtctcaaccactgtgactcaaaac |
| | | aacaacagcgaatttgcttggcctggagcttcttcttgggctctcaatggacgtaatagctt |
| | | gatgaatcctggacctgctatggccagccacaaagaaggagaggaccgtttctttcctttgt |
| | | ctggatctttaatttttggcaaacaaggaactggaagagacaacgtggatgcggacaaagtc |
| | | atgataaccaacgaagaagaaattaaaactactaacccggtagcaacggagtcctatggaca |
| | | agtggccacaaaccaccagagtccgcttaatggtgccgtccatctttatgctcaggcgcaga |
| | | ccggctgggttcaaaaccaaggaatacttccgggtatggtttggcaggacagagatgtgtac |
| | | ctgcaaggacccatttgggccaaaattcctcacacggacggcaactttcacccttctccgct |
| | | gatgggagggtttggaatgaagcacccgcctcctcagatcctcatcaaaaacacacctgtac |
| | | ctgcCgatcctccaacggccttcaacaaggacaagctgaactctttcatcacccagtattct |
| | | actggccaagtcagcgtggagatcgagtgggagctgcagaaggaaaacagcaagcgGtggaa |
| | | cccggagatccagtacacttccaactattacaagtctaataatgttgaatttgctgttaata |
| | | ctgaaggtgtatatagtgaaccccgccccattggcaccagatacctgactcgtaatctgtaa |
| TTD-002 | 3624 | atggctgccgatggttatcttccagattggctcgaggacaaccttagtgaaggaattcgcga |
| 7 mer | | gtggtgggctttgaaacctggagcccctcaacccaaggcaaatcaacaacatcaagacaacg |
| peptide | | ctcgaggtcttgtgcttccgggttacaaataccttggacccggcaacggactcgacaagggg |
| underlined | | gagccggtcaacgcagcagacgcggcggccctcgagcacgacaaggcctacgaccagcagct |
| | | caaggccggagacaacccgtacctcaagtacaaccacgccgacgccgagttccaggagcggc |
| | | tcaaagaagatacgtcttttgggggcaacctcgggcgagcagtcttccaggccaaaaagagg |
| | | cttcttgaacctcttggtctggttgaggaagcggctaagacggctcctggaaagaagaggcc |
| | | tgtagagcagtctcctcaggaaccggactcctccgcgggtattggcaaatcgggtgcacagc |
| | | ccgctaaaaagagactcaatttcggtcagactggcgacacagagtcagtcccagaccctcaa |
| | | ccaatcggagaacctcccgcagccccctcaggtgtgggatctcttacaatggcttcaggtgg |
| | | tggcgcaccagtggcagacaataacgaaggtgccgatggagtgggtagttcctcgggaaatt |
| | | ggcattgcgattcccaatggctgggggacagagtcatcaccaccagcacccgaacctgggcc |
| | | ctgcccacctacaacaatcacctctacaagcaaatctccaacagcacatctggaggatcttc |
| | | aaatgacaacgcctacttcggctacagcaccccctgggggtattttgacttcaacagattcc |
| | | actgccacttctcaccacgtgactggcagcgactcatcaacaacaactggggattccggcct |
| | | aagcgactcaacttcaagctcttcaacattcaggtcaaagaggttacggacaacaatggagt |
| | | caagaccatcgccaataaccttaccagcacggtccaggtcttcacggactcagactatcagc |
| | | tcccgtacgtgctcgggtcggctcacgagggctgcctcccgccgttcccagcggacgttttc |
| | | atgattcctcagtacgggtatctgacgcttaatgatggaagccaggccgtgggtcgttcgtc |
| | | cttttactgcctggaatatttcccgtcgcaaatgctaagaacgggtaacaacttccagttca |
| | | gctacgagtttgagaacgtacctttccatagcagctacgctcacagccaaagcctggaccga |
| | | ctaatgaatccactcatcgaccaatacttgtactatctctcaaagactattaacggttctgg |
| | | acagaatcaacaaacgctaaaattcagtgtggccggacccagcaacatggctgtccagggaa |
| | | gaaactacatacctggacccagctaccgacaacaacgtgtctcaaccactgtgactcaaaac |
| | | aacaacagcgaatttgcttggcctggagcttcttcttgggctctcaatggacgtaatagctt |
| | | gatgaatcctggacctgctatggccagccacaaagaaggagaggaccgtttctttcctttgt |
| | | ctggatctttaatttttggcaaacaaggaactggaagagacaacgtggatgcggacaaagtc |
| | | atgataaccaacgaagaagaaattaaaactactaacccggtagcaacggagtcctatggaca |
| | | agtggccacaaaccaccagagtgcacaggctcgtgattctccgaagggttggcaggcgcaga |
| | | ccggctgggttcaaaaccaaggaatacttccgggtatggtttggcaggacagagatgtgtac |
| | | ctgcaaggacccatttgggccaaaattcctcacacggacggcaactttcacccttctccgct |
| | | gatgggagggtttggaatgaagcacccgcctcctcagatcctcatcaaaaacacacctgtac |
| | | ctgcCgatcctccaacggccttcaacaaggacaagctgaactctttcatcacccagtattct |
| | | actggccaagtcagcgtggagatcgagtgggagctgcagaaggaaaacagcaagcgGtggaa |
| | | cccggagatccagtacacttccaactattacaagtctaataatgttgaatttgctgttaata |
| | | ctgaaggtgtatatagtgaaccccgccccattggcaccagatacctgactcgtaatctgtaa |
| | 3625 | atggctgccgatggttatcttccagattggctcgaggacaaccttagtgaaggaattcgcga |
| | | gtggtgggctttgaaacctggagcccctcaacccaaggcaaatcaacaacatcaagacaacg |
| | | ctcgaggtcttgtgcttccgggttacaaataccttggacccggcaacggactcgacaagggg |
| | | gagccggtcaacgcagcagacgcggcggccctcgagcacgacaaggcctacgaccagcagct |
| | | caaggccggagacaacccgtacctcaagtacaaccacgccgacgccgagttccaggagcggc |
| | | tcaaagaagatacgtcttttgggggcaacctcgggcgagcagtcttccaggccaaaaagagg |
| | | cttcttgaacctcttggtctggttgaggaagcggctaagacggctcctggaaagaagaggcc |
| | | tgtagagcagtctcctcaggaaccggactcctccgcgggtattggcaaatcgggtgcacagc |
| | | ccgctaaaaagagactcaatttcggtcagactggcgacacagagtcagtcccagaccctcaa |
| | | ccaatcggagaacctcccgcagccccctcaggtgtgggatctcttacaatggcttcaggtgg |
| | | tggcgcaccagtggcagacaataacgaaggtgccgatggagtgggtagttcctcgggaaatt |
| | | ggcattgcgattcccaatggctgggggacagagtcatcaccaccagcacccgaacctgggcc |
| | | ctgcccacctacaacaatcacctctacaagcaaatctccaacagcacatctggaggatcttc |
| | | aaatgacaacgcctacttcggctacagcaccccctgggggtattttgacttcaacagattcc |
| | | actgccacttctcaccacgtgactggcagcgactcatcaacaacaactggggattccggcct |
| | | aagcgactcaacttcaagctcttcaacattcaggtcaaagaggttacggacaacaatggagt |
| | | caagaccatcgccaataaccttaccagcacggtccaggtcttcacggactcagactatcagc |
| | | tcccgtacgtgctcgggtcggctcacgagggctgcctcccgccgttcccagcggacgttttc |
| | | atgattcctcagtacgggtatctgacgcttaatgatggaagccaggccgtgggtcgttcgtc |
| | | cttttactgcctggaatatttcccgtcgcaaatgctaagaacgggtaacaacttccagttca |
| | | gctacgagtttgagaacgtacctttccatagcagctacgctcacagccaaagcctggaccga |
| | | ctaatgaatccactcatcgaccaatacttgtactatctctcaaagactattaacggttctgg |
| | | acagaatcaacaaacgctaaaattcagtgtggccggacccagcaacatggctgtccagggaa |
| | | gaaactacatacctggacccagctaccgacaacaacgtgtctcaaccactgtgactcaaaac |
| | | aacaacagcgaatttgcttggcctggagcttcttcttgggctctcaatggacgtaatagctt |
| | | gatgaatcctggacctgctatggccagccacaaagaaggagaggaccgtttctttcctttgt |
| | | ctggatctttaatttttggcaaacaaggaactggaagagacaacgtggatgcggacaaagtc |
| | | atgataaccaacgaagaagaaattaaaactactaacccggtagcaacggagtcctatggaca |
| | | agtggccacaaaccaccagagtgcacaggctcgtgattctccgaagggttggcaggcgcaga |
| | | ccggctgggttcaaaaccaaggaatacttccgggtatggtttggcaggacagagatgtgtac |
| | | ctgcaaggacccatttgggccaaaattcctcacacggacggcaactttcacccttctccgct |
| | | gatgggagggtttggaatgaagcacccgcctcctcagatcctcatcaaaaacacacctgtac |
| | | ctgcggatcctccaacggccttcaacaaggacaagctgaactctttcatcacccagtattct |
| | | actggccaagtcagcgtggagatcgagtgggagctgcagaaggaaaacagcaagcgctggaa |
| | | cccggagatccagtacacttccaactattacaagtctaataatgttgaatttgctgttaata |
| | | ctgaaggtgtatatagtgaaccccgccccattggcaccagatacctgactcgtaatctgtaa |
| TTD-003 | 3626 | atggctgccgatggttatcttccagattggctcgaggacaaccttagtgaaggaattcgcga |
| 7 mer | | gtggtgggctttgaaacctggagcccctcaacccaaggcaaatcaacaacatcaagacaacg |
| peptide | | ctcgaggtcttgtgcttccgggttacaaataccttggacccggcaacggactcgacaagggg |
| underlined | | gagccggtcaacgcagcagacgcggcggccctcgagcacgacaaggcctacgaccagcagct |
| | | caaggccggagacaacccgtacctcaagtacaaccacgccgacgccgagttccaggagcggc |
| | | tcaaagaagatacgtcttttgggggcaacctcgggcgagcagtcttccaggccaaaaagagg |
| | | cttcttgaacctcttggtctggttgaggaagcggctaagacggctcctggaaagaagaggcc |
| | | tgtagagcagtctcctcaggaaccggactcctccgcgggtattggcaaatcgggtgcacagc |
| | | ccgctaaaaagagactcaatttcggtcagactggcgacacagagtcagtcccagaccctcaa |
| | | ccaatcggagaacctcccgcagccccctcaggtgtgggatctcttacaatggcttcaggtgg |
| | | tggcgcaccagtggcagacaataacgaaggtgccgatggagtgggtagttcctcgggaaatt |
| | | ggcattgcgattcccaatggctgggggacagagtcatcaccaccagcacccgaacctgggcc |
| | | ctgcccacctacaacaatcacctctacaagcaaatctccaacagcacatctggaggatcttc |
| | | aaatgacaacgcctacttcggctacagcaccccctgggggtattttgacttcaacagattcc |
| | | actgccacttctcaccacgtgactggcagcgactcatcaacaacaactggggattccggcct |
| | | aagcgactcaacttcaagctcttcaacattcaggtcaaagaggttacggacaacaatggagt |
| | | caagaccatcgccaataaccttaccagcacggtccaggtcttcacggactcagactatcagc |
| | | tcccgtacgtgctcgggtcggctcacgagggctgcctcccgccgttcccagcggacgttttc |
| | | atgattcctcagtacgggtatctgacgcttaatgatggaagccaggccgtgggtcgttcgtc |
| | | cttttactgcctggaatatttcccgtcgcaaatgctaagaacgggtaacaacttccagttca |
| | | gctacgagtttgagaacgtacctttccatagcagctacgctcacagccaaagcctggaccga |
| | | ctaatgaatccactcatcgaccaatacttgtactatctctcaaagactattaacggttctgg |
| | | acagaatcaacaaacgctaaaattcagtgtggccggacccagcaacatggctgtccagggaa |
| | | gaaactacatacctggacccagctaccgacaacaacgtgtctcaaccactgtgactcaaaac |
| | | aacaacagcgaatttgcttggcctggagcttcttcttgggctctcaatggacgtaatagctt |
| | | gatgaatcctggacctgctatggccagccacaaagaaggagaggaccgtttctttcctttgt |
| | | ctggatctttaatttttggcaaacaaggaactggaagagacaacgtggatgcggacaaagtc |
| | | atgataaccaacgaagaagaaattaaaactactaacccggtagcaacggagtcctatggaca |
| | | agtggccacaaaccaccagagtgcacaggcttattctacggatgtgaggatgcaggcgcaga |
| | | ccggctgggttcaaaaccaaggaatacttccgggtatggtttggcaggacagagatgtgtac |
| | | ctgcaaggacccatttgggccaaaattcctcacacggacggcaactttcacccttctccgct |
| | | gatgggagggtttggaatgaagcacccgcctcctcagatcctcatcaaaaacacacctgtac |
| | | ctgcCgatcctccaacggccttcaacaaggacaagctgaactctttcatcacccagtattct |
| | | actggccaagtcagcgtggagatcgagtgggagctgcagaaggaaaacagcaagcgGtggaa |
| | | cccggagatccagtacacttccaactattacaagtctaataatgttgaatttgctgttaata |
| | | ctgaaggtgtatatagtgaaccccgccccattggcaccagatacctgactcgtaatctgtaa |
| TTD-004 | 3627 | atggctgccgatggttatcttccagattggctcgaggacaaccttagtgaaggaattcgcga |
| 7 mer | | gtggtgggctttgaaacctggagcccctcaacccaaggcaaatcaacaacatcaagacaacg |
| peptide | | ctcgaggtcttgtgcttccgggttacaaataccttggacccggcaacggactcgacaagggg |
| underlined | | gagccggtcaacgcagcagacgcggcggccctcgagcacgacaaggcctacgaccagcagct |
| | | caaggccggagacaacccgtacctcaagtacaaccacgccgacgccgagttccaggagcggc |
| | | tcaaagaagatacgtcttttgggggcaacctcgggcgagcagtcttccaggccaaaaagagg |
| | | cttcttgaacctcttggtctggttgaggaagcggctaagacggctcctggaaagaagaggcc |
| | | tgtagagcagtctcctcaggaaccggactcctccgcgggtattggcaaatcgggtgcacagc |
| | | ccgctaaaaagagactcaatttcggtcagactggcgacacagagtcagtcccagaccctcaa |
| | | ccaatcggagaacctcccgcagccccctcaggtgtgggatctcttacaatggcttcaggtgg |
| | | tggcgcaccagtggcagacaataacgaaggtgccgatggagtgggtagttcctcgggaaatt |
| | | ggcattgcgattcccaatggctgggggacagagtcatcaccaccagcacccgaacctgggcc |
| | | ctgcccacctacaacaatcacctctacaagcaaatctccaacagcacatctggaggatcttc |
| | | aaatgacaacgcctacttcggctacagcaccccctgggggtattttgacttcaacagattcc |
| | | actgccacttctcaccacgtgactggcagcgactcatcaacaacaactggggattccggcct |
| | | aagcgactcaacttcaagctcttcaacattcaggtcaaagaggttacggacaacaatggagt |
| | | caagaccatcgccaataaccttaccagcacggtccaggtcttcacggactcagactatcagc |
| | | tcccgtacgtgctcgggtcggctcacgagggctgcctcccgccgttcccagcggacgttttc |
| | | atgattcctcagtacgggtatctgacgcttaatgatggaagccaggccgtgggtcgttcgtc |
| | | cttttactgcctggaatatttcccgtcgcaaatgctaagaacgggtaacaacttccagttca |
| | | gctacgagtttgagaacgtacctttccatagcagctacgctcacagccaaagcctggaccga |
| | | ctaatgaatccactcatcgaccaatacttgtactatctctcaaagactattaacggttctgg |
| | | acagaatcaacaaacgctaaaattcagtgtggccggacccagcaacatggctgtccagggaa |
| | | gaaactacatacctggacccagctaccgacaacaacgtgtctcaaccactgtgactcaaaac |
| | | aacaacagcgaatttgcttggcctggagcttcttcttgggctctcaatggacgtaatagctt |
| | | gatgaatcctggacctgctatggccagccacaaagaaggagaggaccgtttctttcctttgt |
| | | ctggatctttaatttttggcaaacaaggaactggaagagacaacgtggatgcggacaaagtc |
| | | atgataaccaacgaagaagaaattaaaactactaacccggtagcaacggagtcctatggaca |
| | | agtggccacaaaccaccagagtgcacagattgttatgaattcgttgaaggctcaggcgcaga |
| | | ccggctgggttcaaaaccaaggaatacttccgggtatggtttggcaggacagagatgtgtac |
| | | ctgcaaggacccatttgggccaaaattcctcacacggacggcaactttcacccttctccgct |
| | | gatgggagggtttggaatgaagcacccgcctcctcagatcctcatcaaaaacacacctgtac |
| | | ctgcCgatcctccaacggccttcaacaaggacaagctgaactctttcatcacccagtattct |
| | | actggccaagtcagcgtggagatcgagtgggagctgcagaaggaaaacagcaagcgGtggaa |
| | | cccggagatccagtacacttccaactattacaagtctaataatgttgaatttgctgttaata |
| | | ctgaaggtgtatatagtgaaccccgccccattggcaccagatacctgactcgtaatctgtaa |
| TTD-005 | 3628 | atggctgccgatggttatcttccagattggctcgaggacaaccttagtgaaggaattcgcga |
| 7 mer | | gtggtgggctttgaaacctggagcccctcaacccaaggcaaatcaacaacatcaagacaacg |
| peptide | | ctcgaggtcttgtgcttccgggttacaaataccttggacccggcaacggactcgacaagggg |
| underlined | | gagccggtcaacgcagcagacgcggcggccctcgagcacgacaaggcctacgaccagcagct |
| | | caaggccggagacaacccgtacctcaagtacaaccacgccgacgccgagttccaggagcggc |
| | | tcaaagaagatacgtcttttgggggcaacctcgggcgagcagtcttccaggccaaaaagagg |
| | | cttcttgaacctcttggtctggttgaggaagcggctaagacggctcctggaaagaagaggcc |
| | | tgtagagcagtctcctcaggaaccggactcctccgcgggtattggcaaatcgggtgcacagc |
| | | ccgctaaaaagagactcaatttcggtcagactggcgacacagagtcagtcccagaccctcaa |
| | | ccaatcggagaacctcccgcagccccctcaggtgtgggatctcttacaatggcttcaggtgg |
| | | tggcgcaccagtggcagacaataacgaaggtgccgatggagtgggtagttcctcgggaaatt |
| | | ggcattgcgattcccaatggctgggggacagagtcatcaccaccagcacccgaacctgggcc |
| | | ctgcccacctacaacaatcacctctacaagcaaatctccaacagcacatctggaggatcttc |
| | | aaatgacaacgcctacttcggctacagcaccccctgggggtattttgacttcaacagattcc |
| | | actgccacttctcaccacgtgactggcagcgactcatcaacaacaactggggattccggcct |
| | | aagcgactcaacttcaagctcttcaacattcaggtcaaagaggttacggacaacaatggagt |
| | | caagaccatcgccaataaccttaccagcacggtccaggtcttcacggactcagactatcagc |
| | | tcccgtacgtgctcgggtcggctcacgagggctgcctcccgccgttcccagcggacgttttc |
| | | atgattcctcagtacgggtatctgacgcttaatgatggaagccaggccgtgggtcgttcgtc |
| | | cttttactgcctggaatatttcccgtcgcaaatgctaagaacgggtaacaacttccagttca |
| | | gctacgagtttgagaacgtacctttccatagcagctacgctcacagccaaagcctggaccga |
| | | ctaatgaatccactcatcgaccaatacttgtactatctctcaaagactattaacggttctgg |
| | | acagaatcaacaaacgctaaaattcagtgtggccggacccagcaacatggctgtccagggaa |
| | | gaaactacatacctggacccagctaccgacaacaacgtgtctcaaccactgtgactcaaaac |
| | | aacaacagcgaatttgcttggcctggagcttcttcttgggctctcaatggacgtaatagctt |
| | | gatgaatcctggacctgctatggccagccacaaagaaggagaggaccgtttctttcctttgt |
| | | ctggatctttaatttttggcaaacaaggaactggaagagacaacgtggatgcggacaaagtc |
| | | atgataaccaacgaagaagaaattaaaactactaacccggtagcaacggagtcctatggaca |
| | | agtggccacaaaccaccagagtgcacaggctcgggagagtcctcgtgggctgcaggcgcaga |
| | | ccggctgggttcaaaaccaaggaatacttccgggtatggtttggcaggacagagatgtgtac |
| | | ctgcaaggacccatttgggccaaaattcctcacacggacggcaactttcacccttctccgct |
| | | gatgggagggtttggaatgaagcacccgcctcctcagatcctcatcaaaaacacacctgtac |
| | | ctgcCgatcctccaacggccttcaacaaggacaagctgaactctttcatcacccagtattct |
| | | actggccaagtcagcgtggagatcgagtgggagctgcagaaggaaaacagcaagcgGtggaa |
| | | cccggagatccagtacacttccaactattacaagtctaataatgttgaatttgctgttaata |
| | | ctgaaggtgtatatagtgaaccccgccccattggcaccagatacctgactcgtaatctgtaa |
| TTD-006 | 3629 | atggctgccgatggttatcttccagattggctcgaggacaaccttagtgaaggaattcgcga |
| 7 mer | | gtggtgggctttgaaacctggagcccctcaacccaaggcaaatcaacaacatcaagacaacg |
| peptide | | ctcgaggtcttgtgcttccgggttacaaataccttggacccggcaacggactcgacaagggg |
| underlined | | gagccggtcaacgcagcagacgcggcggccctcgagcacgacaaggcctacgaccagcagct |
| | | caaggccggagacaacccgtacctcaagtacaaccacgccgacgccgagttccaggagcggc |
| | | tcaaagaagatacgtcttttgggggcaacctcgggcgagcagtcttccaggccaaaaagagg |
| | | cttcttgaacctcttggtctggttgaggaagcggctaagacggctcctggaaagaagaggcc |
| | | tgtagagcagtctcctcaggaaccggactcctccgcgggtattggcaaatcgggtgcacagc |
| | | ccgctaaaaagagactcaatttcggtcagactggcgacacagagtcagtcccagaccctcaa |
| | | ccaatcggagaacctcccgcagccccctcaggtgtgggatctcttacaatggcttcaggtgg |
| | | tggcgcaccagtggcagacaataacgaaggtgccgatggagtgggtagttcctcgggaaatt |
| | | ggcattgcgattcccaatggctgggggacagagtcatcaccaccagcacccgaacctgggcc |
| | | ctgcccacctacaacaatcacctctacaagcaaatctccaacagcacatctggaggatcttc |
| | | aaatgacaacgcctacttcggctacagcaccccctgggggtattttgacttcaacagattcc |
| | | actgccacttctcaccacgtgactggcagcgactcatcaacaacaactggggattccggcct |
| | | aagcgactcaacttcaagctcttcaacattcaggtcaaagaggttacggacaacaatggagt |
| | | caagaccatcgccaataaccttaccagcacggtccaggtcttcacggactcagactatcagc |
| | | tcccgtacgtgctcgggtcggctcacgagggctgcctcccgccgttcccagcggacgttttc |
| | | atgattcctcagtacgggtatctgacgcttaatgatggaagccaggccgtgggtcgttcgtc |
| | | cttttactgcctggaatatttcccgtcgcaaatgctaagaacgggtaacaacttccagttca |
| | | gctacgagtttgagaacgtacctttccatagcagctacgctcacagccaaagcctggaccga |
| | | ctaatgaatccactcatcgaccaatacttgtactatctctcaaagactattaacggttctgg |
| | | acagaatcaacaaacgctaaaattcagtgtggccggacccagcaacatggctgtccagggaa |
| | | gaaactacatacctggacccagctaccgacaacaacgtgtctcaaccactgtgactcaaaac |
| | | aacaacagcgaatttgcttggcctggagcttcttcttgggctctcaatggacgtaatagctt |
| | | gatgaatcctggacctgctatggccagccacaaagaaggagaggaccgtttctttcctttgt |
| | | ctggatctttaatttttggcaaacaaggaactggaagagacaacgtggatgcggacaaagtc |
| | | atgataaccaacgaagaagaaattaaaactactaacccggtagcaacggagtcctatggaca |
| | | agtggccacaaaccaccagagtgcacaggctagttttaatgatactagggctcaggcgcaga |
| | | ccggctgggttcaaaaccaaggaatacttccgggtatggtttggcaggacagagatgtgtac |
| | | ctgcaaggacccatttgggccaaaattcctcacacggacggcaactttcacccttctccgct |
| | | gatgggagggtttggaatgaagcacccgcctcctcagatcctcatcaaaaacacacctgtac |
| | | ctgcCgatcctccaacggccttcaacaaggacaagctgaactctttcatcacccagtattct |
| | | actggccaagtcagcgtggagatcgagtgggagctgcagaaggaaaacagcaagcgGtggaa |
| | | cccggagatccagtacacttccaactattacaagtctaataatgttgaatttgctgttaata |
| | | ctgaaggtgtatatagtgaaccccgccccattggcaccagatacctgactcgtaatctgtaa |
| TTD-007 | 3630 | atggctgccgatggttatcttccagattggctcgaggacaaccttagtgaaggaattcgcga |
| 9 mer | | gtggtgggctttgaaacctggagcccctcaacccaaggcaaatcaacaacatcaagacaacg |
| peptide | | ctcgaggtcttgtgcttccgggttacaaataccttggacccggcaacggactcgacaagggg |
| underlined | | gagccggtcaacgcagcagacgcggcggccctcgagcacgacaaggcctacgaccagcagct |
| | | caaggccggagacaacccgtacctcaagtacaaccacgccgacgccgagttccaggagcggc |
| | | tcaaagaagatacgtcttttgggggcaacctcgggcgagcagtcttccaggccaaaaagagg |
| | | cttcttgaacctcttggtctggttgaggaagcggctaagacggctcctggaaagaagaggcc |
| | | tgtagagcagtctcctcaggaaccggactcctccgcgggtattggcaaatcgggtgcacagc |
| | | ccgctaaaaagagactcaatttcggtcagactggcgacacagagtcagtcccagaccctcaa |
| | | ccaatcggagaacctcccgcagccccctcaggtgtgggatctcttacaatggcttcaggtgg |
| | | tggcgcaccagtggcagacaataacgaaggtgccgatggagtgggtagttcctcgggaaatt |
| | | ggcattgcgattcccaatggctgggggacagagtcatcaccaccagcacccgaacctgggcc |
| | | ctgcccacctacaacaatcacctctacaagcaaatctccaacagcacatctggaggatcttc |
| | | aaatgacaacgcctacttcggctacagcaccccctgggggtattttgacttcaacagattcc |
| | | actgccacttctcaccacgtgactggcagcgactcatcaacaacaactggggattccggcct |
| | | aagcgactcaacttcaagctcttcaacattcaggtcaaagaggttacggacaacaatggagt |
| | | caagaccatcgccaataaccttaccagcacggtccaggtcttcacggactcagactatcagc |
| | | tcccgtacgtgctcgggtcggctcacgagggctgcctcccgccgttcccagcggacgttttc |
| | | atgattcctcagtacgggtatctgacgcttaatgatggaagccaggccgtgggtcgttcgtc |
| | | cttttactgcctggaatatttcccgtcgcaaatgctaagaacgggtaacaacttccagttca |
| | | gctacgagtttgagaacgtacctttccatagcagctacgctcacagccaaagcctggaccga |
| | | ctaatgaatccactcatcgaccaatacttgtactatctctcaaagactattaacggttctgg |
| | | acagaatcaacaaacgctaaaattcagtgtggccggacccagcaacatggctgtccagggaa |
| | | gaaactacatacctggacccagctaccgacaacaacgtgtctcaaccactgtgactcaaaac |
| | | aacaacagcgaatttgcttggcctggagcttcttcttgggctctcaatggacgtaatagctt |
| | | gatgaatcctggacctgctatggccagccacaaagaaggagaggaccgtttctttcctttgt |
| | | ctggatctttaatttttggcaaacaaggaactggaagagacaacgtggatgcggacaaagtc |
| | | atgataaccaacgaagaagaaattaaaactactaacccggtagcaacggagtcctatggaca |
| | | agtggccacaaaccaccagagtggtggtacgttggccgtcgtgtcgcttgctcaggcgcaga |
| | | ccggctgggttcaaaaccaaggaatacttccgggtatggtttggcaggacagagatgtgtac |
| | | ctgcaaggacccatttgggccaaaattcctcacacggacggcaactttcacccttctccgct |
| | | gatgggagggtttggaatgaagcacccgcctcctcagatcctcatcaaaaacacacctgtac |
| | | ctgcCgatcctccaacggccttcaacaaggacaagctgaactctttcatcacccagtattct |
| | | actggccaagtcagcgtggagatcgagtgggagctgcagaaggaaaacagcaagcgGtggaa |
| | | cccggagatccagtacacttccaactattacaagtctaataatgttgaatttgctgttaata |
| | | ctgaaggtgtatatagtgaaccccgccccattggcaccagatacctgactcgtaatctgtaa |
| TTD-008 | 3631 | atggctgccgatggttatcttccagattggctcgaggacaaccttagtgaaggaattcgcga |
| 7 mer | | gtggtgggctttgaaacctggagcccctcaacccaaggcaaatcaacaacatcaagacaacg |
| peptide | | ctcgaggtcttgtgcttccgggttacaaataccttggacccggcaacggactcgacaagggg |
| underlined | | gagccggtcaacgcagcagacgcggcggccctcgagcacgacaaggcctacgaccagcagct |
| | | caaggccggagacaacccgtacctcaagtacaaccacgccgacgccgagttccaggagcggc |
| | | tcaaagaagatacgtcttttgggggcaacctcgggcgagcagtcttccaggccaaaaagagg |
| | | cttcttgaacctcttggtctggttgaggaagcggctaagacggctcctggaaagaagaggcc |
| | | tgtagagcagtctcctcaggaaccggactcctccgcgggtattggcaaatcgggtgcacagc |
| | | ccgctaaaaagagactcaatttcggtcagactggcgacacagagtcagtcccagaccctcaa |
| | | ccaatcggagaacctcccgcagccccctcaggtgtgggatctcttacaatggcttcaggtgg |
| | | tggcgcaccagtggcagacaataacgaaggtgccgatggagtgggtagttcctcgggaaatt |
| | | ggcattgcgattcccaatggctgggggacagagtcatcaccaccagcacccgaacctgggcc |
| | | ctgcccacctacaacaatcacctctacaagcaaatctccaacagcacatctggaggatcttc |
| | | aaatgacaacgcctacttcggctacagcaccccctgggggtattttgacttcaacagattcc |
| | | actgccacttctcaccacgtgactggcagcgactcatcaacaacaactggggattccggcct |
| | | aagcgactcaacttcaagctcttcaacattcaggtcaaagaggttacggacaacaatggagt |
| | | caagaccatcgccaataaccttaccagcacggtccaggtcttcacggactcagactatcagc |
| | | tcccgtacgtgctcgggtcggctcacgagggctgcctcccgccgttcccagcggacgttttc |
| | | atgattcctcagtacgggtatctgacgcttaatgatggaagccaggccgtgggtcgttcgtc |
| | | cttttactgcctggaatatttcccgtcgcaaatgctaagaacgggtaacaacttccagttca |
| | | gctacgagtttgagaacgtacctttccatagcagctacgctcacagccaaagcctggaccga |
| | | ctaatgaatccactcatcgaccaatacttgtactatctctcaaagactattaacggttctgg |
| | | acagaatcaacaaacgctaaaattcagtgtggccggacccagcaacatggctgtccagggaa |
| | | gaaactacatacctggacccagctaccgacaacaacgtgtctcaaccactgtgactcaaaac |
| | | aacaacagcgaatttgcttggcctggagcttcttcttgggctctcaatggacgtaatagctt |
| | | gatgaatcctggacctgctatggccagccacaaagaaggagaggaccgtttctttcctttgt |
| | | ctggatctttaatttttggcaaacaaggaactggaagagacaacgtggatgcggacaaagtc |
| | | atgataaccaacgaagaagaaattaaaactactaacccggtagcaacggagtcctatggaca |
| | | agtggccacaaaccaccagagtgcacaggcttatgggttgccgaagggtcctcaggcgcaga |
| | | ccggctgggttcaaaaccaaggaatacttccgggtatggtttggcaggacagagatgtgtac |
| | | ctgcaaggacccatttgggccaaaattcctcacacggacggcaactttcacccttctccgct |
| | | gatgggagggtttggaatgaagcacccgcctcctcagatcctcatcaaaaacacacctgtac |
| | | ctgcCgatcctccaacggccttcaacaaggacaagctgaactctttcatcacccagtattct |
| | | actggccaagtcagcgtggagatcgagtgggagctgcagaaggaaaacagcaagcgGtggaa |
| | | cccggagatccagtacacttccaactattacaagtctaataatgttgaatttgctgttaata |
| | | ctgaaggtgtatatagtgaaccccgccccattggcaccagatacctgactcgtaatctgtaa |
| TTD-009 | 3632 | atggctgccgatggttatcttccagattggctcgaggacaaccttagtgaaggaattcgcga |
| 7 mer | | gtggtgggctttgaaacctggagcccctcaacccaaggcaaatcaacaacatcaagacaacg |
| peptide | | ctcgaggtcttgtgcttccgggttacaaataccttggacccggcaacggactcgacaagggg |
| underlined | | gagccggtcaacgcagcagacgcggcggccctcgagcacgacaaggcctacgaccagcagct |
| | | caaggccggagacaacccgtacctcaagtacaaccacgccgacgccgagttccaggagcggc |
| | | tcaaagaagatacgtcttttgggggcaacctcgggcgagcagtcttccaggccaaaaagagg |
| | | cttcttgaacctcttggtctggttgaggaagcggctaagacggctcctggaaagaagaggcc |
| | | tgtagagcagtctcctcaggaaccggactcctccgcgggtattggcaaatcgggtgcacagc |
| | | ccgctaaaaagagactcaatttcggtcagactggcgacacagagtcagtcccagaccctcaa |
| | | ccaatcggagaacctcccgcagccccctcaggtgtgggatctcttacaatggcttcaggtgg |
| | | tggcgcaccagtggcagacaataacgaaggtgccgatggagtgggtagttcctcgggaaatt |
| | | ggcattgcgattcccaatggctgggggacagagtcatcaccaccagcacccgaacctgggcc |
| | | ctgcccacctacaacaatcacctctacaagcaaatctccaacagcacatctggaggatcttc |
| | | aaatgacaacgcctacttcggctacagcaccccctgggggtattttgacttcaacagattcc |
| | | actgccacttctcaccacgtgactggcagcgactcatcaacaacaactggggattccggcct |
| | | aagcgactcaacttcaagctcttcaacattcaggtcaaagaggttacggacaacaatggagt |
| | | caagaccatcgccaataaccttaccagcacggtccaggtcttcacggactcagactatcagc |
| | | tcccgtacgtgctcgggtcggctcacgagggctgcctcccgccgttcccagcggacgttttc |
| | | atgattcctcagtacgggtatctgacgcttaatgatggaagccaggccgtgggtcgttcgtc |
| | | cttttactgcctggaatatttcccgtcgcaaatgctaagaacgggtaacaacttccagttca |
| | | gctacgagtttgagaacgtacctttccatagcagctacgctcacagccaaagcctggaccga |
| | | ctaatgaatccactcatcgaccaatacttgtactatctctcaaagactattaacggttctgg |
| | | acagaatcaacaaacgctaaaattcagtgtggccggacccagcaacatggctgtccagggaa |
| | | gaaactacatacctggacccagctaccgacaacaacgtgtctcaaccactgtgactcaaaac |
| | | aacaacagcgaatttgcttggcctggagcttcttcttgggctctcaatggacgtaatagctt |
| | | gatgaatcctggacctgctatggccagccacaaagaaggagaggaccgtttctttcctttgt |
| | | ctggatctttaatttttggcaaacaaggaactggaagagacaacgtggatgcggacaaagtc |
| | | atgataaccaacgaagaagaaattaaaactactaacccggtagcaacggagtcctatggaca |
| | | agtggccacaaaccaccagagtgcacaggcttcgactgggacgcttcggcttcaggcgcaga |
| | | ccggctgggttcaaaaccaaggaatacttccgggtatggtttggcaggacagagatgtgtac |
| | | ctgcaaggacccatttgggccaaaattcctcacacggacggcaactttcacccttctccgct |
| | | gatgggagggtttggaatgaagcacccgcctcctcagatcctcatcaaaaacacacctgtac |
| | | ctgcCgatcctccaacggccttcaacaaggacaagctgaactctttcatcacccagtattct |
| | | actggccaagtcagcgtggagatcgagtgggagctgcagaaggaaaacagcaagcgGtggaa |
| | | cccggagatccagtacacttccaactattacaagtctaataatgttgaatttgctgttaata |
| | | ctgaaggtgtatatagtgaaccccgccccattggcaccagatacctgactcgtaatctgtaa |
| TTD-010 | 3633 | atggctgccgatggttatcttccagattggctcgaggacaaccttagtgaaggaattcgcga |
| 7 mer | | gtggtgggctttgaaacctggagcccctcaacccaaggcaaatcaacaacatcaagacaacg |
| peptide | | ctcgaggtcttgtgcttccgggttacaaataccttggacccggcaacggactcgacaagggg |
| underlined | | gagccggtcaacgcagcagacgcggcggccctcgagcacgacaaggcctacgaccagcagct |
| | | caaggccggagacaacccgtacctcaagtacaaccacgccgacgccgagttccaggagcggc |
| | | tcaaagaagatacgtcttttgggggcaacctcgggcgagcagtcttccaggccaaaaagagg |
| | | cttcttgaacctcttggtctggttgaggaagcggctaagacggctcctggaaagaagaggcc |
| | | tgtagagcagtctcctcaggaaccggactcctccgcgggtattggcaaatcgggtgcacagc |
| | | ccgctaaaaagagactcaatttcggtcagactggcgacacagagtcagtcccagaccctcaa |
| | | ccaatcggagaacctcccgcagccccctcaggtgtgggatctcttacaatggcttcaggtgg |
| | | tggcgcaccagtggcagacaataacgaaggtgccgatggagtgggtagttcctcgggaaatt |
| | | ggcattgcgattcccaatggctgggggacagagtcatcaccaccagcacccgaacctgggcc |
| | | ctgcccacctacaacaatcacctctacaagcaaatctccaacagcacatctggaggatcttc |
| | | aaatgacaacgcctacttcggctacagcaccccctgggggtattttgacttcaacagattcc |
| | | actgccacttctcaccacgtgactggcagcgactcatcaacaacaactggggattccggcct |
| | | aagcgactcaacttcaagctcttcaacattcaggtcaaagaggttacggacaacaatggagt |
| | | caagaccatcgccaataaccttaccagcacggtccaggtcttcacggactcagactatcagc |
| | | tcccgtacgtgctcgggtcggctcacgagggctgcctcccgccgttcccagcggacgttttc |
| | | atgattcctcagtacgggtatctgacgcttaatgatggaagccaggccgtgggtcgttcgtc |
| | | cttttactgcctggaatatttcccgtcgcaaatgctaagaacgggtaacaacttccagttca |
| | | gctacgagtttgagaacgtacctttccatagcagctacgctcacagccaaagcctggaccga |
| | | ctaatgaatccactcatcgaccaatacttgtactatctctcaaagactattaacggttctgg |
| | | acagaatcaacaaacgctaaaattcagtgtggccggacccagcaacatggctgtccagggaa |
| | | gaaactacatacctggacccagctaccgacaacaacgtgtctcaaccactgtgactcaaaac |
| | | aacaacagcgaatttgcttggcctggagcttcttcttgggctctcaatggacgtaatagctt |
| | | gatgaatcctggacctgctatggccagccacaaagaaggagaggaccgtttctttcctttgt |
| | | ctggatctttaatttttggcaaacaaggaactggaagagacaacgtggatgcggacaaagtc |
| | | atgataaccaacgaagaagaaattaaaactactaacccggtagcaacggagtcctatggaca |
| | | agtggccacaaaccaccagagtgcgcaggcgtattcgacggatgagaggatgcaggcgcaga |
| | | ccggctgggttcaaaaccaaggaatacttccgggtatggtttggcaggacagagatgtgtac |
| | | ctgcaaggacccatttgggccaaaattcctcacacggacggcaactttcacccttctccgct |
| | | gatgggagggtttggaatgaagcacccgcctcctcagatcctcatcaaaaacacacctgtac |
| | | ctgcCgatcctccaacggccttcaacaaggacaagctgaactctttcatcacccagtattct |
| | | actggccaagtcagcgtggagatcgagtgggagctgcagaaggaaaacagcaagcgGtggaa |
| | | cccggagatccagtacacttccaactattacaagtctaataatgttgaatttgctgttaata |
| | | ctgaaggtgtatatagtgaaccccgccccattggcaccagatacctgactcgtaatctgtaa |
| TTD-011 | 3634 | atggctgccgatggttatcttccagattggctcgaggacaaccttagtgaaggaattcgcga |
| 7 mer | | gtggtgggctttgaaacctggagcccctcaacccaaggcaaatcaacaacatcaagacaacg |
| peptide | | ctcgaggtcttgtgcttccgggttacaaataccttggacccggcaacggactcgacaagggg |
| underlined | | gagccggtcaacgcagcagacgcggcggccctcgagcacgacaaggcctacgaccagcagct |
| | | caaggccggagacaacccgtacctcaagtacaaccacgccgacgccgagttccaggagcggc |
| | | tcaaagaagatacgtcttttgggggcaacctcgggcgagcagtcttccaggccaaaaagagg |
| | | cttcttgaacctcttggtctggttgaggaagcggctaagacggctcctggaaagaagaggcc |
| | | tgtagagcagtctcctcaggaaccggactcctccgcgggtattggcaaatcgggtgcacagc |
| | | ccgctaaaaagagactcaatttcggtcagactggcgacacagagtcagtcccagaccctcaa |
| | | ccaatcggagaacctcccgcagccccctcaggtgtgggatctcttacaatggcttcaggtgg |
| | | tggcgcaccagtggcagacaataacgaaggtgccgatggagtgggtagttcctcgggaaatt |
| | | ggcattgcgattcccaatggctgggggacagagtcatcaccaccagcacccgaacctgggcc |
| | | ctgcccacctacaacaatcacctctacaagcaaatctccaacagcacatctggaggatcttc |
| | | aaatgacaacgcctacttcggctacagcaccccctgggggtattttgacttcaacagattcc |
| | | actgccacttctcaccacgtgactggcagcgactcatcaacaacaactggggattccggcct |
| | | aagcgactcaacttcaagctcttcaacattcaggtcaaagaggttacggacaacaatggagt |
| | | caagaccatcgccaataaccttaccagcacggtccaggtcttcacggactcagactatcagc |
| | | tcccgtacgtgctcgggtcggctcacgagggctgcctcccgccgttcccagcggacgttttc |
| | | atgattcctcagtacgggtatctgacgcttaatgatggaagccaggccgtgggtcgttcgtc |
| | | cttttactgcctggaatatttcccgtcgcaaatgctaagaacgggtaacaacttccagttca |
| | | gctacgagtttgagaacgtacctttccatagcagctacgctcacagccaaagcctggaccga |
| | | ctaatgaatccactcatcgaccaatacttgtactatctctcaaagactattaacggttctgg |
| | | acagaatcaacaaacgctaaaattcagtgtggccggacccagcaacatggctgtccagggaa |
| | | gaaactacatacctggacccagctaccgacaacaacgtgtctcaaccactgtgactcaaaac |
| | | aacaacagcgaatttgcttggcctggagcttcttcttgggctctcaatggacgtaatagctt |
| | | gatgaatcctggacctgctatggccagccacaaagaaggagaggaccgtttctttcctttgt |
| | | ctggatctttaatttttggcaaacaaggaactggaagagacaacgtggatgcggacaaagtc |
| | | atgataaccaacgaagaagaaattaaaactactaacccggtagcaacggagtcctatggaca |
| | | agtggccacaaaccaccagagtgcgcaggcgtattcgacggatgagaggaagcaggcgcaga |
| | | ccggctgggttcaaaaccaaggaatacttccgggtatggtttggcaggacagagatgtgtac |
| | | ctgcaaggacccatttgggccaaaattcctcacacggacggcaactttcacccttctccgct |
| | | gatgggagggtttggaatgaagcacccgcctcctcagatcctcatcaaaaacacacctgtac |
| | | ctgcCgatcctccaacggccttcaacaaggacaagctgaactctttcatcacccagtattct |
| | | actggccaagtcagcgtggagatcgagtgggagctgcagaaggaaaacagcaagcgGtggaa |
| | | cccggagatccagtacacttccaactattacaagtctaataatgttgaatttgctgttaata |
| | | ctgaaggtgtatatagtgaaccccgccccattggcaccagatacctgactcgtaatctgtaa |
| TTD-012 | 3635 | atggctgccgatggttatcttccagattggctcgaggacaaccttagtgaaggaattcgcga |
| 7 mer | | gtggtgggctttgaaacctggagcccctcaacccaaggcaaatcaacaacatcaagacaacg |
| peptide | | ctcgaggtcttgtgcttccgggttacaaataccttggacccggcaacggactcgacaagggg |
| underlined | | gagccggtcaacgcagcagacgcggcggccctcgagcacgacaaggcctacgaccagcagct |
| | | caaggccggagacaacccgtacctcaagtacaaccacgccgacgccgagttccaggagcggc |
| | | tcaaagaagatacgtcttttgggggcaacctcgggcgagcagtcttccaggccaaaaagagg |
| | | cttcttgaacctcttggtctggttgaggaagcggctaagacggctcctggaaagaagaggcc |
| | | tgtagagcagtctcctcaggaaccggactcctccgcgggtattggcaaatcgggtgcacagc |
| | | ccgctaaaaagagactcaatttcggtcagactggcgacacagagtcagtcccagaccctcaa |
| | | ccaatcggagaacctcccgcagccccctcaggtgtgggatctcttacaatggcttcaggtgg |
| | | tggcgcaccagtggcagacaataacgaaggtgccgatggagtgggtagttcctcgggaaatt |
| | | ggcattgcgattcccaatggctgggggacagagtcatcaccaccagcacccgaacctgggcc |
| | | ctgcccacctacaacaatcacctctacaagcaaatctccaacagcacatctggaggatcttc |
| | | aaatgacaacgcctacttcggctacagcaccccctgggggtattttgacttcaacagattcc |
| | | actgccacttctcaccacgtgactggcagcgactcatcaacaacaactggggattccggcct |
| | | aagcgactcaacttcaagctcttcaacattcaggtcaaagaggttacggacaacaatggagt |
| | | caagaccatcgccaataaccttaccagcacggtccaggtcttcacggactcagactatcagc |
| | | tcccgtacgtgctcgggtcggctcacgagggctgcctcccgccgttcccagcggacgttttc |
| | | atgattcctcagtacgggtatctgacgcttaatgatggaagccaggccgtgggtcgttcgtc |
| | | cttttactgcctggaatatttcccgtcgcaaatgctaagaacgggtaacaacttccagttca |
| | | gctacgagtttgagaacgtacctttccatagcagctacgctcacagccaaagcctggaccga |
| | | ctaatgaatccactcatcgaccaatacttgtactatctctcaaagactattaacggttctgg |
| | | acagaatcaacaaacgctaaaattcagtgtggccggacccagcaacatggctgtccagggaa |
| | | gaaactacatacctggacccagctaccgacaacaacgtgtctcaaccactgtgactcaaaac |
| | | aacaacagcgaatttgcttggcctggagcttcttcttgggctctcaatggacgtaatagctt |
| | | gatgaatcctggacctgctatggccagccacaaagaaggagaggaccgtttctttcctttgt |
| | | ctggatctttaatttttggcaaacaaggaactggaagagacaacgtggatgcggacaaagtc |
| | | atgataaccaacgaagaagaaattaaaactactaacccggtagcaacggagtcctatggaca |
| | | agtggccacaaaccaccagagtgcacaggcttatgtttcgtctgttaagatgcaggcgcaga |
| | | ccggctgggttcaaaaccaaggaatacttccgggtatggtttggcaggacagagatgtgtac |
| | | ctgcaaggacccatttgggccaaaattcctcacacggacggcaactttcacccttctccgct |
| | | gatgggagggtttggaatgaagcacccgcctcctcagatcctcatcaaaaacacacctgtac |
| | | ctgcCgatcctccaacggccttcaacaaggacaagctgaactctttcatcacccagtattct |
| | | actggccaagtcagcgtggagatcgagtgggagctgcagaaggaaaacagcaagcgGtggaa |
| | | cccggagatccagtacacttccaactattacaagtctaataatgttgaatttgctgttaata |
| | | ctgaaggtgtatatagtgaaccccgccccattggcaccagatacctgactcgtaatctgtaa |
| TTD-013 | 4 | ATGGCTGCCGATGGTTATCTTCCAGATTGGCTCGAGGACAACCTTAGTGAAGGAATTCGCGA |
| | | GTGGTGGGCTTTGAAACCTGGAGCCCCTCAACCCAAGGCAAATCAACAACATCAAGACAACG |
| | | CTCGAGGTCTTGTGCTTCCGGGTTACAAATACCTTGGACCCGGCAACGGACTCGACAAGGGG |
| | | GAGCCGGTCAACGCAGCAGACGCGGCGGCCCTCGAGCACGACAAGGCCTACGACCAGCAGCT |
| | | CAAGGCCGGAGACAACCCGTACCTCAAGTACAACCACGCCGACGCCGAGTTCCAGGAGCGGC |
| | | TCAAAGAAGATACGTCTTTTGGGGGCAACCTCGGGCGAGCAGTCTTCCAGGCCAAAAAGAGG |
| | | CTTCTTGAACCTCTTGGTCTGGTTGAGGAAGCGGCTAAGACGGCTCCTGGAAAGAAGAGGCC |
| | | TGTAGAGCAGTCTCCTCAGGAACCGGACTCCTCCGCGGGTATTGGCAAATCGGGTGCACAGC |
| | | CCGCTAAAAAGAGACTCAATTTCGGTCAGACTGGCGACACAGAGTCAGTCCCAGACCCTCAA |
| | | CCAATCGGAGAACCTCCCGCAGCCCCCTCAGGTGTGGGATCTCTTACAATGGCTTCAGGTGG |
| | | TGGCGCACCAGTGGCAGACAATAACGAAGGTGCCGATGGAGTGGGTAGTTCCTCGGGAAATT |
| | | GGCATTGCGATTCCCAATGGCTGGGGGACAGAGTCATCACCACCAGCACCCGAACCTGGGCC |
| | | CTGCCCACCTACAACAATCACCTCTACAAGCAAATCTCCAACAGCACATCTGGAGGATCTTC |
| | | AAATGACAACGCCTACTTCGGCTACAGCACCCCCTGGGGGTATTTTGACTTCAACAGATTCC |
| | | ACTGCCACTTCTCACCACGTGACTGGCAGCGACTCATCAACAACAACTGGGGATTCCGGCCT |
| | | AAGCGACTCAACTTCAAGCTCTTCAACATTCAGGTCAAAGAGGTTACGGACAACAATGGAGT |
| | | CAAGACCATCGCCAATAACCTTACCAGCACGGTCCAGGTCTTCACGGACTCAGACTATCAGC |
| | | TCCCGTACGTGCTCGGGTCGGCTCACGAGGGCTGCCTCCCGCCGTTCCCAGCGGACGTTTTC |
| | | ATGATTCCTCAGTACGGGTATCTGACGCTTAATGATGGAAGCCAGGCCGTGGGTCGTTCGTC |
| | | CTTTTACTGCCTGGAATATTTCCCGTCGCAAATGCTAAGAACGGGTAACAACTTCCAGTTCA |
| | | GCTACGAGTTTGAGAACGTACCTTTCCATAGCAGCTACGCTCACAGCCAAAGCCTGGACCGA |
| | | CTAATGAATCCACTCATCGACCAATACTTGTACTATCTCTCAAAGACTATTAACGGTTCTGG |
| | | ACAGAATCAACAAACGCTAAAATTCAGTGTGGCCGGACCCAGCAACATGGCTGTCCAGGGAA |
| | | GAAACTACATACCTGGACCCAGCTACCGACAACAACGTGTCTCAACCACTGTGACTCAAAAC |
| | | AACAACAGCGAATTTGCTTGGCCTGGAGCTTCTTCTTGGGCTCTCAATGGACGTAATAGCTT |
| | | GATGAATCCTGGACCTGCTATGGCCAGCCACAAAGAAGGAGAGGACCGTTTCTTTCCTTTGT |
| | | CTGGATCTTTAATTTTTGGCAAACAAGGAACTGGAAGAGACAACGTGGATGCGGACAAAGTC |
| | | ATGATAACCAACGAAGAAGAAATTAAAACTACTAACCCGGTAGCAACGGAGTCCTATGGACA |
| | | AGTGGCCACAAACCACCAGAGTccgcttaatggtgccgtccatctttatGCTCAGGCGCAGA |
| | | CCGGCTGGGTTccgAACCAAGGAATACTTCCGGGTATGGTTTGGCAGGACAGAGATGTGTAC |
| | | CTGCAAGGACCCATTTGGGCCAAAATTCCTCACACGGACGGCAACTTTCACCCTTCTCCGCT |
| | | GATGGGAGGGTTTGGAATGAAGCACCCGCCTCCTCAGATCCTCATCAAAAACACACCTGTAC |
| | | CTGCCGATCCTCCAACGGCCTTCAACAAGGACAAGCTGAACTCTTTCATCACCCAGTATTCT |
| | | ACTGGCCAAGTCAGCGTGGAGATCGAGTGGGAGCTGCAGAAGGAAAACAGCAAGCGGTGGAA |
| | | CCCGGAGATCCAGTACACTTCCAACTATTACAAGTCTAATAATGTTGAATTTGCTGTTAATA |
| | | CTGAAGGTGTATATAGTGAACCCCGCCCCATTGGCACCAGATACCTGACTCGTAATCTGTAA |
| TTD-014 | 7 | ATGGCTGCCGATGGTTATCTTCCAGATTGGCTCGAGGACAACCTTAGTGAAGGAATTCGCGA |
| | | GTGGTGGGCTTTGAAACCTGGAGCCCCTCAACCCAAGGCAAATCAACAACATCAAGACAACG |
| | | CTCGAGGTCTTGTGCTTCCGGGTTACAAATACCTTGGACCCGGCAACGGACTCGACAAGGGG |
| | | GAGCCGGTCAACGCAGCAGACGCGGCGGCCCTCGAGCACGACAAGGCCTACGACCAGCAGCT |
| | | CAAGGCCGGAGACAACCCGTACCTCAAGTACAACCACGCCGACGCCGAGTTCCAGGAGCGGC |
| | | TCAAAGAAGATACGTCTTTTGGGGGCAACCTCGGGCGAGCAGTCTTCCAGGCCAAAAAGAGG |
| | | CTTCTTGAACCTCTTGGTCTGGTTGAGGAAGCGGCTAAGACGGCTCCTGGAAAGAAGAGGCC |
| | | TGTAGAGCAGTCTCCTCAGGAACCGGACTCCTCCGCGGGTATTGGCAAATCGGGTGCACAGC |
| | | CCGCTAAAAAGAGACTCAATTTCGGTCAGACTGGCGACACAGAGTCAGTCCCAGACCCTCAA |
| | | CCAATCGGAGAACCTCCCGCAGCCCCCTCAGGTGTGGGATCTCTTACAATGGCTTCAGGTGG |
| | | TGGCGCACCAGTGGCAGACAATAACGAAGGTGCCGATGGAGTGGGTAGTTCCTCGGGAAATT |
| | | GGCATTGCGATTCCCAATGGCTGGGGGACAGAGTCATCACCACCAGCACCCGAACCTGGGCC |
| | | CTGCCCACCTACAACAATCACCTCTACAAGCAAATCTCCAACAGCACATCTGGAGGATCTTC |
| | | AAATGACAACGCCTACTTCGGCTACAGCACCCCCTGGGGGTATTTTGACTTCAACAGATTCC |
| | | ACTGCCACTTCTCACCACGTGACTGGCAGCGACTCATCAACAACAACTGGGGATTCCGGCCT |
| | | AAGCGACTCAACTTCAAGCTCTTCAACATTCAGGTCAAAGAGGTTACGGACAACAATGGAGT |
| | | CAAGACCATCGCCAATAACCTTACCAGCACGGTCCAGGTCTTCACGGACTCAGACTATCAGC |
| | | TCCCGTACGTGCTCGGGTCGGCTCACGAGGGCTGCCTCCCGCCGTTCCCAGCGGACGTTTTC |
| | | ATGATTCCTCAGTACGGGTATCTGACGCTTAATGATGGAAGCCAGGCCGTGGGTCGTTCGTC |
| | | CTTTTACTGCCTGGAATATTTCCCGTCGCAAATGCTAAGAACGGGTAACAACTTCCAGTTCA |
| | | GCTACGAGTTTGAGAACGTACCTTTCCATAGCAGCTACGCTCACAGCCAAAGCCTGGACCGA |
| | | CTAATGAATCCACTCATCGACCAATACTTGTACTATCTCTCAAAGACTATTAACGGTTCTGG |
| | | ACAGAATCAACAAACGCTAAAATTCAGTGTGGCCGGACCCAGCAACATGGCTGTCCAGGGAA |
| | | GAAACTACATACCTGGACCCAGCTACCGACAACAACGTGTCTCAACCACTGTGACTCAAAAC |
| | | AACAACAGCGAATTTGCTTGGCCTGGAGCTTCTTCTTGGGCTCTCAATGGACGTAATAGCTT |
| | | GATGAATCCTGGACCTGCTATGGCCAGCCACAAAGAAGGAGAGGACCGTTTCTTTCCTTTGT |
| | | CTGGATCTTTAATTTTTGGCAAACAAGGAACTGGAAGAGACAACGTGGATGCGGACAAAGTC |
| | | ATGATAACCAACGAAGAAGAAATTAAAACTACTAACCCGGTAGCAACGGAGTCCTATGGACA |
| | | gGTcGCtACGAATCATCAGTCTCCGCTGAATGGTGCGGTGCATCTGTATGCGCAGGCGCAGC |
| | | TGTCTCCGGTGAAGAATcaaggaatacttccgggtatgGTTTGGCAGGACAGAGATGTGTAC |
| | | CTGCAAGGACCCATTTGGGCCAAAATTCCTCACACGGACGGCAACTTTCACCCTTCTCCGCT |
| | | GATGGGAGGGTTTGGAATGAAGCACCCGCCTCCTCAGATCCTCATCAAAAACACACCTGTAC |
| | | CTGCCGATCCTCCAACGGCCTTCAACAAGGACAAGCTGAACTCTTTCATCACCCAGTATTCT |
| | | ACTGGCCAAGTCAGCGTGGAGATCGAGTGGGAGCTGCAGAAGGAAAACAGCAAGCGGTGGAA |
| | | CCCGGAGATCCAGTACACTTCCAACTATTACAAGTCTAATAATGTTGAATTTGCTGTTAATA |
| | | CTGAAGGTGTATATAGTGAACCCCGCCCCATTGGCACCAGATACCTGACTCGTAATCTGTAA |

[1745] In some embodiments, the polynucleotide encoding an AAV capsid polypeptide, e.g., AAV capsid variant, described herein comprises the nucleotide sequence of any one of SEQ ID NOs: 4, 7, 3623-3635, or a nucleotide sequence with at least 80% (e.g., at least about 85, 90, 95, 96, 97, 98, or 99%) sequence identity thereto. In some embodiments, the polynucleotide encoding an AAV capsid variant described herein comprises the nucleotide sequence of SEQ ID NO: 3623, or a nucleotide sequence with at least 80% (e.g., at least about 85, 90, 95, 96, 97, 98, or 99%) sequence identity thereto. In some embodiments, the polynucleotide encoding an AAV capsid variant described herein comprises the nucleotide sequence of SEQ ID NO: 4, or a nucleotide sequence with at least 80% (e.g., at least about 85, 90, 95, 96, 97, 98, or 99%) sequence identity thereto. In some embodiments, the polynucleotide encoding an AAV capsid variant described herein comprises the nucleotide sequence of SEQ ID NO: 7, or a nucleotide sequence with at least 80% (e.g., at least about 85, 90, 95, 96, 97, 98, or 99%) sequence identity thereto. In some embodiments, the polynucleotide encoding an AAV capsid variant described herein comprises the nucleotide sequence of SEQ ID NO: 3627, or a nucleotide sequence with at least 80% (e.g., at least about 85, 90, 95, 96, 97, 98, or 99%) sequence identity thereto. In some embodiments, the nucleic acid sequence encoding an AAV capsid polypeptide, e.g., an AAV capsid variant, described herein is codon optimized.

[1746] In some embodiments, the AAV capsid polypeptide, e.g., the AAV capsid variant, comprises a VP2 protein comprising the amino acid sequence corresponding to positions 138-743, of any one of SEQ ID NOs: 5, 8, 3636-3647, or a sequence with at least 80% (e.g., at least about 85, 90, 95, 96, 97, 98, or 99%) sequence identity thereto. In some embodiments, the AAV capsid comprises a VP3 protein comprising the amino acid sequence corresponding to positions 203-743, of any one of SEQ ID NOs: 5, 8, 3636-3647, or a sequence with at least 80% (e.g., at least about 85, 90, 95, 96, 97, 98, or 99%) sequence identity thereto.

[1747] In some embodiments, the AAV capsid polypeptide, e.g., the AAV capsid variant, e.g., an AAV capsid variant described herein, comprises the amino acid sequence of any one of SEQ ID NOs: 5, 8, 3636-3647, or an amino acid sequence with at least 80% (e.g., at least about 85, 90, 95, 96, 97, 98, or 99%) sequence identity thereto. In some embodiments, the AAV capsid polypeptide, e.g., the AAV capsid variant, e.g., an AAV capsid variant described herein, comprises an amino acid sequence comprising at least one, two, or three modifications, substitutions (e.g., conservative substitutions), insertions, or deletions, but not more than 30, 20 or 10 modifications, substitutions (e.g., conservative substitutions), insertions, or deletions relative to the amino acid sequence of any one of SEQ ID NOs: 5, 8, 3636-3647. In some embodiments, the AAV capsid polypeptide, e.g., the AAV capsid variant, e.g., an AAV capsid variant described herein, comprises an amino acid sequence having at least one, two, or three but no more than 30, 20, or 10 different amino acids relative to the amino acid sequence of any one of SEQ ID NOs: 5, 8, 3636-3647.

[1748] In some embodiments, the AAV capsid polypeptide, e.g., the AAV capsid variant, e.g., an AAV capsid variant described herein, comprises the amino acid sequence of SEQ ID NO: 3636, or an amino acid sequence with at least 80% (e.g., at least about 85, 90, 95, 96, 97, 98, or 99%) sequence identity thereto. In some embodiments, the AAV capsid polypeptide, e.g., the AAV capsid variant, e.g., an AAV capsid variant described herein, comprises an amino acid sequence comprising at least one, two, or three modifications, substitutions (e.g., conservative substitutions), insertions, or deletions, but not more than 30, 20 or 10 modifications, substitutions (e.g., conservative substitutions), insertions, or deletions relative to the amino acid sequence of SEQ ID NO: 3636. In some embodiments, the AAV capsid polypeptide, e.g., the AAV capsid variant, e.g., an AAV capsid variant described herein, comprises an amino acid sequence having at least one, two, or three but no more than 30, 20, or 10 different amino acids relative to the amino acid sequence of SEQ ID NO: 3636.

[1749] In some embodiments, the AAV capsid polypeptide, e.g., the AAV capsid variant, e.g., an AAV capsid variant described herein, comprises the amino acid sequence of SEQ ID NO: 5, or an amino acid sequence with at least 80% (e.g., at least about 85, 90, 95, 96, 97, 98, or 99%) sequence identity thereto. In some embodiments, the AAV capsid polypeptide, e.g., the AAV capsid variant, e.g., an AAV capsid variant described herein, comprises an amino acid sequence comprising at least one, two, or three modifications, substitutions (e.g., conservative substitutions), insertions, or deletions, but not more than 30, 20 or 10 modifications, substitutions (e.g., conservative substitutions), insertions, or deletions relative to the amino acid sequence of SEQ ID NO: 5. In some embodiments, the AAV capsid polypeptide, e.g., the AAV capsid variant, e.g., an AAV capsid variant described herein, comprises an amino acid sequence having at least one, two, or three but no more than 30, 20, or 10 different amino acids relative to the amino acid sequence of SEQ ID NO: 5.

[1750] In some embodiments, the AAV capsid polypeptide, e.g., the AAV capsid variant, e.g., an AAV capsid variant described herein, comprises the amino acid sequence of SEQ ID NO: 8, or an amino acid sequence with at least 80% (e.g., at least about 85, 90, 95, 96, 97, 98, or 99%) sequence identity thereto. In some embodiments, the AAV capsid polypeptide, e.g., the AAV capsid variant, e.g., an AAV capsid variant described herein, comprises an amino acid sequence comprising at least one, two, or three modifications, substitutions (e.g., conservative substitutions), insertions, or deletions, but not more than 30, 20 or 10 modifications, substitutions (e.g., conservative substitutions), insertions, or deletions relative to the amino acid sequence of SEQ ID NO: 8. In some embodiments, the AAV capsid polypeptide, e.g., the AAV capsid variant, e.g., an AAV capsid variant described herein, comprises an amino acid sequence having at least one, two, or three but no more than 30, 20, or 10 different amino acids relative to the amino acid sequence of SEQ ID NO: 8.

[1751] In some embodiments, an AAV capsid polypeptide, e.g., an AAV capsid variant, described herein has an increased tropism for a CNS cell or tissue, e.g., a brain cell, brain tissue, spinal cord cell, or spinal cord tissue, relative to the tropism of a reference sequence comprising the amino acid sequence of SEQ ID NO: 138.

[1752] In some embodiments, an AAV capsid polypeptide, e.g., an AAV capsid variant, described herein has an increased tropism for a CNS cell or tissue, e.g., a brain cell, brain tissue, spinal cord cell, or spinal cord tissue, relative to the tropism of a reference sequence comprising the amino acid sequence of SEQ ID NO: 3636.

[1753] In some embodiments, an AAV capsid polypeptide, e.g., an AAV capsid variant, described herein transduces a brain region, e.g., selected from dentate nucleus, cerebellar cortex, cerebral cortex, brain stem, hippocampus, thalamus and putamen. In some embodiments, the level of transduction of said brain region is at least 5, 10, 50, 100, 200, 500, 1,000, 2,000, 5,000, or 10,000-fold greater as compared to a reference sequence of SEQ ID NO: 138.

[1754] In some embodiments, an AAV capsid polypeptide, e.g., an AAV capsid variant, described herein is enriched at least about 5, 6, 7, 8, 9, or 10-fold, in the brain compared to a reference sequence of SEQ ID NO: 138. In some embodiments, an AAV capsid variant described herein is enriched at least about 20, 30, 40, or 50-fold in the brain compared to a reference sequence of SEQ ID NO: 138. In some embodiments, an AAV capsid variant described herein is enriched at least about 100, 200, 300, or 400-fold in the brain compared to a reference sequence of SEQ ID NO: 138.

[1755] In some embodiments, AAV capsid polypeptide, e.g., an AAV capsid variant, described herein is enriched at least about 2, 2.5, 3, 3.5, 4, 4.5, 5, 5.5, or 6-fold, in the brain compared to a reference sequence of SEQ ID NO: 3636. In some embodiments, AAV capsid polypeptide, e.g., an AAV capsid variant, described herein is enriched at least about 1.1, 1.2, 1.3, 1.4, 1.5, 1.6, 1.7, 1.8, 1.9, 2, 2.5, 3, 3.5, 4, 4.5, 5, 5.5, or 6-fold, in the brain compared to a reference sequence of SEQ ID NO: 3636.

[1756] In some embodiments, an AAV capsid polypeptide, e.g., an AAV capsid variant, described herein delivers an increased level of viral genomes to a brain region. In some embodiments, the level of viral genomes is increased by at least 5, 10, 20, 30, 40 or 50-fold, as compared to a reference sequence of SEQ ID NO: 138. In some embodiments, the brain region comprises a frontal cortex, sensory cortex, motor cortex, putamen, thalamus, cerebellar cortex, dentate nucleus, caudate, and/or hippocampus.

[1757] In some embodiments, an AAV capsid polypeptide, e.g., an AAV capsid variant, described herein delivers an increased level of a payload to a brain region. In some embodiments, the level of the payload is increased by at least 5, 10, 50, 100, 200, 500, 1,000, 2,000, 5,000, or 10,000-fold, as compared to a reference sequence of SEQ ID NO: 138. In some embodiments, the brain region comprises a frontal cortex, sensory cortex, motor cortex, putamen, thalamus, cerebellar cortex, dentate nucleus, caudate, and/or hippocampus.

[1758] In some embodiments, an AAV capsid polypeptide, e.g., an AAV capsid variant, described herein delivers an increased level of a payload to a spinal cord region. In some embodiments, the level of the payload is increased by at least 10, 20, 50, 100, 200, 300, 400, 500, 600, 700, 800 or 900-fold, as compared to a reference sequence of SEQ ID NO: 138. In some embodiments, the spinal cord region comprises a cervical, thoracic, and/or lumbar region.

[1759] In some embodiments, an AAV capsid polypeptide, e.g., an AAV capsid variant, described herein shows preferential transduction in a brain region relative to the transduction in the dorsal root ganglia (DRG).

[1760] In some embodiments, an AAV capsid polypeptide, e.g., an AAV capsid variant, described herein has an increased tropism for a muscle cell or tissue, e.g., a heart cell or tissue, relative to the tropism of a reference sequence comprising the amino acid sequence of SEQ ID NO: 138. In some embodiments, the AAV capsid variant delivers an increased level of a payload to a muscle region. In some embodiments, the payload is increased by at least 10, 15, 20, 30, or 40-fold, as compared to a reference sequence of SEQ ID NO: 138. In some embodiments, the muscle region comprises a heart muscle, quadriceps muscle, and/or a diaphragm muscle region. In some embodiments, the muscle region comprises a heart muscle region, e.g., a heart atrium muscle region or a heart ventricle muscle region.

[1761] In some embodiments, an AAV capsid polypeptide, e.g., an AAV capsid variant described herein results in greater than 1, 2, 5, 10, 20, 30, 40, 50, or 100 reads per sample, e.g., when analyzed by an NGS sequencing assay.

[1762] In some embodiments, an AAV capsid polypeptide, e.g., an AAV capsid variant, of the present disclosure has decreased tropism for the liver. In some embodiments, an AAV capsid variant comprises a modification, e.g., substitution (e.g., conservative substitution), insertion, or deletion, that results in reduced tropism (e.g., de-targeting) and/or activity in the liver. In some embodiments, the reduced tropism in the liver is compared to an otherwise similar capsid that does not comprise the modification, e.g., a wild-type capsid polypeptide. In some embodiments, an AAV capsid variant described comprises a modification, e.g., substitution (e.g., conservative substitution), insertion, or deletion, that results in one or more of the following properties: (1) reduced tropism in the liver; (2) de-targeted expression in the liver; (3) reduced activity in the liver; and/or (4) reduced binding to galactose. In some embodiments, the reduction in any one, or all of properties (1)-(3) is compared to an otherwise similar AAV capsid variant that does not comprise the modification. Exemplary modifications are provided in WO 2018/119330; Pulicherla et al. (2011) Mol. Ther. 19(6): 1070-1078; Adachi et al. (2014) Nature Communications 5(3075), DOI: 10.1038/ncomms4075; and Bell et al. (2012) J. Virol. 86(13): 7326-33; the contents of which are hereby incorporated by reference in their entirety. In some embodiments, the AAV capsid variant comprises a modification e.g., substitution (e.g., conservative substitution), insertion, or deletion, at position N470 (e.g., N470A), D271 (e.g., D271A), N272 (e.g., N297A), Y446 (e.g., Y446A), N498 (e.g., N498Y or N498I), W503 (e.g., W530R or W530A), L620 (e.g., L620F), or a combination thereof, relative to a reference sequence numbered according to SEQ ID NO: 138. In some embodiments, the AAV capsid variant comprises one, two, three, four, five or all of an amino acid other than N at position 470 (e.g., A), an amino acid other than D at position 271 (e.g., A), an amino acid other than N at position 272 (e.g., A), an amino acid other than Y at position 446 (e.g., A), and amino acid other than N at position 498/(e.g., Y or I), and amino acid other than W at position 503 (e.g., R or A), and amino acid other than L at position 620 (e.g., F), relative to a reference sequence numbered according to SEQ ID NO: 138. In some embodiments, the AAV capsid variant comprises a modification e.g., substitution (e.g., conservative substitution), insertion, or deletion, at position N470 (e.g., N470A), D271 (e.g., D271A), N272 (e.g., N297A), Y446 (e.g., Y446A), and W503 (e.g., W530R or W530A), relative to a reference sequence numbered according to SEQ ID NO: 138. In some embodiments, the AAV capsid variant comprises a modification e.g., substitution (e.g., conservative substitution), insertion, or deletion, at N498 (e.g., N498Y) and L620 (e.g., L620F).

[1763] In some embodiments, an AAV capsid variant comprised herein comprises a modification as described in Adachi et al. (2014) Nature Communications 5(3075), DOI: 10.1038/ncomms4075, the contents of which are hereby incorporated by reference in its entirety. Exemplary modifications that alter or do not alter tissue transduction in at least the brain, liver, heart, lung, and/or kidney can be found in Supplementary Data 2 showing the AAV Barcode-Seq data obtained with AAV9-AA-VBCLib of Adachi et al. (supra), the contents of which are hereby incorporated by reference in its entirety.

[1764] In some embodiments, an, AAV capsid polypeptide, e.g., an AAV capsid variant, of the present disclosure is isolated, e.g., recombinant. In some embodiments, a polynucleotide encoding an AAV capsid polypeptide, e.g., an AAV capsid variant, of the present disclosure is isolated, e.g., recombinant.

[1765] In any of the DNA and RNA sequences referenced and/or described herein, the single letter symbol has the following description: A for adenine; C for cytosine; G for guanine; T for thymine; U for Uracil; W for weak bases such as adenine or thymine; S for strong nucleotides such as cytosine and guanine; M for amino nucleotides such as adenine and cytosine; K for keto nucleotides such as guanine and thymine; R for purines adenine and guanine; Y for pyrimidine cytosine and thymine; B for any base that is not A (e.g., cytosine, guanine, and thymine); D for any base that is not C (e.g., adenine, guanine, and thymine); H for any base that is not G (e.g., adenine, cytosine, and thymine); V for any base that is not T (e.g., adenine, cytosine, and guanine); N for any nucleotide (which is not a gap); and Z is for zero.

[1766] In any of the amino acid sequences referenced and/or described herein, the single letter symbol has the following description: G (Gly) for Glycine; A (Ala) for Alanine; L (Leu) for Leucine; M (Met) for Methionine; F (Phe) for Phenylalanine; W (Trp) for Tryptophan; K (Lys) for Lysine; Q (Gln) for Glutamine; E (Glu) for Glutamic Acid; S (Ser) for Serine; P (Pro) for Proline; V (Val) for Valine; I (Ile) for Isoleucine; C (Cys) for Cysteine; Y (Tyr) for Tyrosine; H (His) for Histidine; R (Arg) for Arginine; N (Asn) for Asparagine; D (Asp) for Aspartic Acid; T (Thr) for Threonine; B (Asx) for Aspartic acid or Asparagine; J (Xle) for Leucine or Isoleucine; O (Pyl) for Pyrrolysine; U (Sec) for Selenocysteine; X (Xaa) for any amino acid; and Z (Glx) for Glutamine or Glutamic acid.

[1767] Also provided herein are polynucleotide sequences encoding any of the AAV capsid variants described above and AAV particles, vectors, cells, and formulations, e.g., pharmaceutical formulations, comprising the same.

### AAV Serotypes and Capsids

[1768] In some embodiments, an AAV particle of the present disclosure may comprise a capsid polypeptide or variant thereof from any natural or recombinant AAV serotype. AAV serotypes may differ in characteristics such as, but not limited to, packaging, tropism, transduction and immunogenic profiles. While not wishing to be bound by theory, it is believed in some embodiments, that the AAV capsid protein, e.g., an AAV capsid variant, can modulate, e.g., direct, AAV particle tropism to a particular tissue.

[1769] In some embodiments, an AAV capsid polypeptide, e.g., AAV capsid variant, described herein allows for blood brain barrier penetration following intravenous administration. In some embodiments, the AAV capsid polypeptide, e.g., AAV capsid variant, allows for blood brain barrier penetration following focused ultrasound (FUS), e.g., coupled with the intravenous administration of microbubbles (FUS-MB), or MRI-guided FUS coupled with intravenous administration. In some embodiments the AAV capsid polypeptide, e.g., AAV capsid variant allows for increased distribution to a brain region. In some embodiments, the brain region comprises a frontal cortex, sensory cortex, motor cortex, caudate, dentate nucleus, cerebellar cortex, cerebral cortex, brain stem, hippocampus, thalamus, putamen, or a combination thereof. In some embodiments, the AAV capsid polypeptide, e.g., AAV capsid variant allows for preferential transduction in a brain region relative to the transduction in the dorsal root ganglia (DRG).

[1770] In some embodiments an AAV capsid polypeptide, e.g., AAV capsid variant, described herein allows for increased distribution to a spinal cord region. In some embodiments, the spinal region comprises a cervical spinal cord region, thoracic spinal cord region, and/or lumbar spinal cord region.

[1771] In some embodiments, the AAV capsid polypeptide, e.g., AAV capsid variant, is suitable for intramuscular administration and/or transduction of muscle fibers. In some embodiments the AAV capsid polypeptide, e.g., AAV capsid variant, allows for increased distribution to a muscle region. In some embodiments, the muscle region comprises a heart muscle, quadriceps muscle, a diaphragm muscle region, or a combination thereof. In some embodiments, the muscle region comprises a heart muscle region, e.g., a heart atrium muscle region or a heart ventricle muscle region.

[1772] In some embodiments, the initiation codon for translation of the AAV VP1 capsid protein, e.g., a capsid variant, described herein may be CTG, TTG, or GTG as described in U.S. Pat. No. 8,163,543, the contents of which are herein incorporated by reference in its entirety.

[1773] The present disclosure refers to structural capsid proteins (including VP1, VP2 and VP3) which are encoded by capsid (Cap) genes. These capsid proteins form an outer protein structural shell (e.g. capsid) of a viral vector such as AAV. VP capsid proteins synthesized from Cap polynucleotides generally include a methionine as the first amino acid in the peptide sequence (Met1), which is associated with the start codon (AUG or ATG) in the corresponding Cap nucleotide sequence. However, it is common for a first-methionine (Met1) residue or generally any first amino acid (AA1) to be cleaved off after or during polypeptide synthesis by protein processing enzymes such as Met-aminopeptidases. This “Met/AA-clipping” process often correlates with a corresponding acetylation of the second amino acid in the polypeptide sequence (e.g., alanine, valine, serine, threonine, etc.). Met-clipping commonly occurs with VP1 and VP3 capsid proteins but can also occur with VP2 capsid proteins.

[1774] Where the Met/AA-clipping is incomplete, a mixture of one or more (one, two or three) VP capsid proteins comprising the viral capsid may be produced, some of which may include a Met1/AA1 amino acid (Met+/AA+) and some of which may lack a Met1/AA1 amino acid as a result of Met/AA-clipping (Met−/AA−). For further discussion regarding Met/AA-clipping in capsid proteins, see Jin, et al. Direct Liquid Chromatography/Mass Spectrometry Analysis for Complete Characterization of Recombinant Adeno-Associated Virus Capsid Proteins. Hum Gene Ther Methods. 2017 Oct. 28(5):255-267; Hwang, et al. N-Terminal Acetylation of Cellular Proteins Creates Specific Degradation Signals. Science. 2010 Feb. 19. 327(5968): 973-977; the contents of which are each incorporated herein by reference in its entirety.

[1775] According to the present disclosure, references to capsid proteins, e.g., AAV capsid variants, is not limited to either clipped (Met−/AA−) or unclipped (Met+/AA+) and may, in context, refer to independent capsid proteins, viral capsids comprised of a mixture of capsid proteins, and/or polynucleotide sequences (or fragments thereof) which encode, describe, produce or result in capsid proteins of the present disclosure. A direct reference to a capsid protein or capsid polypeptide (such as VP1, VP2 or VP2) may also comprise VP capsid proteins which include a Met1/AA1 amino acid (Met+/AA+) as well as corresponding VP capsid proteins which lack the Met1/AA1 amino acid as a result of Met/AA-clipping (Met−/AA−).

[1776] Further according to the present disclosure, a reference to a specific SEQ ID NO: (whether a protein or nucleic acid) which comprises or encodes, respectively, one or more capsid proteins which include a Met1/AA1 amino acid (Met+/AA+) should be understood to teach the VP capsid proteins which lack the Met1/AA1 amino acid as upon review of the sequence, it is readily apparent any sequence which merely lacks the first listed amino acid (whether or not Met1/AA1).

[1777] As a non-limiting example, reference to a VP1 polypeptide sequence which is 736 amino acids in length and which includes a “Met1” amino acid (Met+) encoded by the AUG/ATG start codon may also be understood to teach a VP1 polypeptide sequence which is 735 amino acids in length and which does not include the “Met1” amino acid (Met−) of the 736 amino acid Met+ sequence. As a second non-limiting example, reference to a VP1 polypeptide sequence which is 736 amino acids in length and which includes an “AA1” amino acid (AA1+) encoded by any NNN initiator codon may also be understood to teach a VP1 polypeptide sequence which is 735 amino acids in length and which does not include the “AA1” amino acid (AA1−) of the 736 amino acid AA1+ sequence.

[1778] References to viral capsids formed from VP capsid proteins (such as reference to specific AAV capsid serotypes), can incorporate VP capsid proteins which include a Met1/AA1 amino acid (Met+/AA1+), corresponding VP capsid proteins which lack the Met1/AA1 amino acid as a result of Met/AA1-clipping (Met−/AA1−), and combinations thereof (Met+/AA1+ and Met−/AA1−).

[1779] As a non-limiting example, an AAV capsid serotype can include VP1 (Met+/AA1+), VP1 (Met−/AA1−), or a combination of VP1 (Met+/AA1+) and VP1 (Met−/AA1−). An AAV capsid serotype can also include VP3 (Met+/AA1+), VP3 (Met−/AA1−), or a combination of VP3 (Met+/AA1+) and VP3 (Met−/AA1−); and can also include similar optional combinations of VP2 (Met+/AA1) and VP2 (Met−/AA1−).

### Additional AAV Sequences

[1780] In some embodiments, the AAV capsid polypeptide, e.g., AAV capsid variant, comprises, immediately subsequent to position 586, 588, or 589 numbered relative to SEQ ID NO: 138, at least 3, 4, 5, 6, 7, 8, 9, 10, 11, 12, 13, 14, 15, 16, 17, or 18 consecutive amino acids of any of SEQ ID NOs: 139-1172, 1725-3622 or 3648-3659.

[1781] In some embodiments, the AAV capsid variant, comprises immediately subsequent to position 586, 588, or 589, numbered relative to SEQ ID NO: 138 or corresponding to equivalent positions in any other AAV serotype (e.g., AAV1, AAV2, AAV3, AAV3b, AAV4, AAV5, AAV6, AAV7, AAV8, AAVrh8, AAVrh10, AAVrh32.33, AAVrh74, SEQ ID NO: 1, SEQ ID NO: 11, PHP.N, PHP.B, or an AAV serotype as provided in Table 6 of WO 2021/230987 (the contents of which are hereby incorporated by reference in their entirety)), at least 3, 4, 5, 6, 7, 8, 9, 10, 11, 12, 13, 14, 15, 16, 17, 18, or 19 consecutive amino acids of any of amino acid sequence provided in Tables 1A, 1B, 2, 7, 10, 11, or 20. In some embodiments, the at least 3, 4, 5, 6, 7, 8, 9, 10, 11, 12, 13, 14, 15, 16, 17, 18, or 19 consecutive amino acids of any of amino acid sequence provided in Tables 1A, 1B, 2, 7, 10, 11, or 20 replaces at least one, two, three, four, five, six, seven, eight, nine, ten, elven, or all of positions A587, Q588, A589, Q590, A591, Q592, T593, G594, W595, V596, Q597, and/or N598, numbered according to SEQ ID NO: 138 or corresponding to equivalent positions in any other AAV serotype (e.g., AAV1, AAV2, AAV3, AAV3b, AAV4, AAV5, AAV6, AAV7, AAV8, AAVrh8, AAVrh10, AAVrh32.33, AAVrh74, SEQ ID NO: 1, SEQ ID NO: 11, PHP.N, PHP.B, or an AAV serotype as provided in Table 6 of WO 2021/230987 (the contents of which are hereby incorporated by reference in their entirety). In some embodiments, the at least 3, 4, 5, 6, 7, 8, 9, 10, 11, 12, 13, 14, 15, 16, 17, 18, or 19 consecutive amino acids of any of amino acid sequence provided in Tables 1A, 1B, 2, 7, 10, 11, or 20 replaces positions A587, Q588, or both positions A587 and Q588, numbered according to SEQ ID NO: 138 or corresponding to equivalent positions in any other AAV serotype (e.g., AAV1, AAV2, AAV3, AAV3b, AAV4, AAV5, AAV6, AAV7, AAV8, AAVrh8, AAVrh10, AAVrh32.33, AAVrh74, SEQ ID NO: 1, SEQ ID NO: 11, PHP.N, PHP.B, or an AAV serotype as provided in Table 6 of WO 2021/230987 (the contents of which are hereby incorporated by reference in their entirety). In some embodiments, the AAV capsid variant comprises an amino acid other than the wild-type, e.g., native, amino acid, at one, two, three, four, five, six, seven, eight, nine, ten, eleven or all of positions A587, Q588, A589, Q590, A591, Q592, T593, G594, W595, V596, Q597, and/or N598, numbered according to SEQ ID NO: 138 or corresponding to equivalent positions in any other AAV serotype (e.g., AAV1, AAV2, AAV3, AAV3b, AAV4, AAV5, AAV6, AAV7, AAV8, AAVrh8, AAVrh10, AAVrh32.33, AAVrh74, SEQ ID NO: 1, SEQ ID NO: 11, PHP.N, PHP.B, or an AAV serotype as provided in Table 6 of WO 2021/230987 (the contents of which are hereby incorporated by reference in their entirety). In some embodiments, the AAV capsid variant comprises an amino acid other than the wild-type, e.g., native, amino acid, at position A587, Q588, or both positions A587 and Q588, numbered according to SEQ ID NO: 138 or corresponding to equivalent positions in any other AAV serotype (e.g., AAV1, AAV2, AAV3, AAV3b, AAV4, AAV5, AAV6, AAV7, AAV8, AAVrh8, AAVrh10, AAVrh32.33, AAVrh74, SEQ ID NO: 1, SEQ ID NO: 11, PHP.N, PHP.B, or an AAV serotype as provided in Table 6 of WO 2021/230987 (the contents of which are hereby incorporated by reference in their entirety)). In some embodiments, the AAV capsid variant comprises a modification, e.g., substitution, at one, two, three, four, five, six, seven, eight, nine, ten eleven or all of positions A587, Q588, A589, Q590, A591, Q592, T593, G594, W595, V596, Q597, and/or N598, numbered according to SEQ ID NO: 138 or corresponding to equivalent positions in any other AAV serotype (e.g., AAV1, AAV2, AAV3, AAV3b, AAV4, AAV5, AAV6, AAV7, AAV8, AAVrh8, AAVrh10, AAVrh32.33, AAVrh74, SEQ ID NO: 1, SEQ ID NO: 11, PHP.N, PHP.B, or an AAV serotype as provided in Table 6 of WO 2021/230987 (the contents of which are hereby incorporated by reference in their entirety). In some embodiments, the AAV capsid variant comprises a modification, e.g., substitution, at position A587, Q588, or both positions A587 and Q588, numbered according to SEQ ID NO: 138 or corresponding to equivalent positions in any other AAV serotype (e.g., AAV1, AAV2, AAV3, AAV3b, AAV4, AAV5, AAV6, AAV7, AAV8, AAVrh8, AAVrh10, AAVrh32.33, AAVrh74, SEQ ID NO: 1, SEQ ID NO: 11, PHP.N, PHP.B, or an AAV serotype as provided in Table 6 of WO 2021/230987 (the contents of which are hereby incorporated by reference in their entirety).

[1782] In any of the embodiments described herein, a position comprising 5 consecutive amino acids corresponding to positions 586 to 599, e.g., 586 to 594, 587 to 595, 588 to 596, 589 to 597, 590 to 598 numbered relative to SEQ ID NO: 138 can be identified by providing an alignment of a reference sequence and a query sequence, wherein the reference sequence is SEQ ID NO: 138, and identifying the residues corresponding to the positions in the query sequence that correspond to positions 586 to 599, e.g., 586 to 594, 587 to 595, 588 to 596, 589 to 597, 590 to 598 in the reference sequence.

[1783] In some embodiments, the AAV capsid polypeptide, e.g., AAV capsid variant, described herein does not comprise an amino acid sequence present immediately subsequent to position 586, 588, or 589 numbered relative to SEQ ID NO: 138, having at least 5 consecutive amino acids corresponding to positions 586 to 599, e.g., 586 to 594, 587 to 595, 588 to 596, 589 to 597, 590 to 598, of any of the amino acid sequences in Table 1 of WO2020223276, the contents of which are hereby incorporated by reference in their entirety.

[1784] In some embodiments, the AAV capsid polypeptide, e.g., AAV capsid variant, described herein does not comprise an amino acid sequence present immediately subsequent to position 586, 588, or 589 numbered relative to SEQ ID NO: 138, at least 5 consecutive amino acids corresponding to positions 586 to 599, e.g., 586 to 594, 587 to 595, 588 to 596, 589 to 597, 590 to 598, of SEQ ID NO: 138. In some embodiments, the AAV capsid polypeptide, e.g., AAV capsid variant, described herein, does not comprise an amino acid sequence present immediately subsequent to position 586, 588, or 589 numbered relative to SEQ ID NO: 138, having at least 5 consecutive amino acids corresponding to positions 586 to 599, e.g., 586 to 594, 587 to 595, 588 to 596, 589 to 597, 590 to 598, of SEQ ID NO: 12. In some embodiments, the AAV capsid polypeptide, e.g., AAV capsid variant, described herein, does not comprise an amino acid sequence present immediately subsequent to position 586, 588, or 589 numbered relative to SEQ ID NO: 138, having at least than 5 consecutive amino acids corresponding to positions 586 to 599, e.g., 586 to 594, 587 to 595, 588 to 596, 589 to 597, 590 to 598, of SEQ ID NO: 13. In some embodiments, the AAV capsid polypeptide, e.g., AAV capsid variant, or the parent AAV capsid may be, at a position other than 5 consecutive amino acids corresponding to positions 586 to 599, e.g., 586 to 594, 587 to 595, 588 to 596, 589 to 597, 590 to 598, of SEQ ID NO: 1. In some embodiments, the AAV capsid polypeptide, e.g., AAV capsid variant, described herein, does not comprise an amino acid sequence present immediately subsequent to position 586, 588, or 589 numbered relative to SEQ ID NO: 138, having at least 5 consecutive amino acids corresponding to positions 586 to 599, e.g., 586 to 594, 587 to 595, 588 to 596, 589 to 597, 590 to 598, of SEQ ID NO: 3.

[1785] In some embodiments, the AAV capsid polypeptide, e.g., AAV capsid variant, described herein, does not comprise the amino acid sequence of TLAVPFK (SEQ ID NO: 1262) present immediately subsequent to position 588, numbered according to SEQ ID NO: 138.

[1786] In some embodiments, an AAV capsid polypeptide or AAV capsid variant described herein may comprise a VOY101 capsid polypeptide, an AAVPHP.B (PHP.B) capsid polypeptide, a AAVPHP.N (PHP.N) capsid polypeptide, an AAV1 capsid polypeptide, an AAV2 capsid polypeptide, an AAV5 capsid polypeptide, an AAV9 capsid polypeptide, an AAV9 K449R capsid polypeptide, an AAVrh10 capsid polypeptide, or a functional variant thereof. In some embodiments, the AAV capsid polypeptide, e.g., AAV capsid variant, comprises an amino acid sequence of any of the AAV capsid polypeptides in Table 6, or an amino acid sequence substantially identical (e.g., having at least 70%, 75%, 80%, 85%, 90%, 92%, 95%, 97%, 98%, or 99% sequence identity) thereto. In some embodiments, the nucleotide sequence encoding the AAV capsid polypeptide comprises any one of the nucleotide sequences in Table 6, or a nucleotide sequence substantially identical (e.g., having at least 70%, 75%, 80%, 85%, 90%, 92%, 95%, 97%, 98%, or 99% sequence identity) thereto.

[1787] In some embodiments, an AAV capsid polypeptide or an AAV capsid variant described herein comprises the amino acid sequence of SEQ ID NO: 138 or an amino acid sequence substantially identical (e.g., having at least 70%, 75%, 80%, 85%, 90%, 92%, 95%, 97%, 98%, or 99% sequence identity) thereto. In some embodiments the AAV capsid polypeptide or the AAV capsid variant, comprises an amino acid sequence comprising at least one, two, or three modifications, e.g., substitutions (e.g., conservative substitutions), insertions, or deletions, but no more than 30, 20, or 10 modifications, e.g., substitutions (e.g., conservative substitutions), insertions, or deletions, relative to the amino acid sequence of SEQ ID NO: 138. In some embodiments, the AAV capsid polypeptide or the AAV capsid variant, comprises an amino acid sequence encoded by the nucleotide sequence of SEQ ID NO: 137 or a nucleotide sequence substantially identical (e.g., having at least 70%, 75%, 80%, 85%, 90%, 92%, 95%, 97%, 98%, or 99% sequence identity) thereto. In some embodiments, the nucleotide sequence encoding the AAV capsid polypeptide or the AAV capsid variant comprises the nucleotide sequence of SEQ ID NO: 137, or a nucleotide sequence substantially identical (e.g., having at least 70%, 75%, 80%, 85%, 90%, 92%, 95%, 97%, 98%, or 99% sequence identity) thereto. In some embodiments, the AAV capsid polypeptide or the AAV capsid variant, comprises substitution at position K449, e.g., a K449R substitution, numbered according to SEQ ID NO: 138.

[1788] In some embodiments, the AAV capsid polypeptide or the AAV capsid variant comprises the amino acid sequence of SEQ ID NO: 11 or an amino acid sequence substantially identical (e.g., having at least 70%, 75%, 80%, 85%, 90%, 92%, 95%, 97%, 98%, or 99% sequence identity) thereto. In some embodiments the AAV capsid polypeptide or the AAV capsid variant, comprises an amino acid sequence comprising at least one, two, or three modifications, e.g., substitutions (e.g., conservative substitutions), insertions, or deletions, but no more than 30, 20, or 10 modifications, e.g., substitutions (e.g., conservative substitutions), insertions, or deletions, relative to the amino acid sequence of SEQ ID NO: 11, optionally wherein position 449 is not R.

TABLE 6
AAV Sequences

| | SEQ | |
|---|---|---|
| | ID | |
| Serotype | NO: | Sequence |
| VOY101 | 1 | MAADGYLPDWLEDNLSEGIREWWALKPGAPQPKANQQHQDNARGLVLPGYKYLGPGNGLDK |
| | | GEPVNAADAAALEHDKAYDQQLKAGDNPYLKYNHADAEFQERLKEDTSFGGNLGRAVFQAK |
| | | KRLLEPLGLVEEAAKTAPGKKRPVEQSPQEPDSSAGIGKSGAQPAKKRLNFGQTGDTESVP |
| | | DPQPIGEPPAAPSGVGSLTMASGGGAPVADNNEGADGVGSSSGNWHCDSQWLGDRVITTST |
| | | RTWALPTYNNHLYKQISNSTSGGSSNDNAYFGYSTPWGYFDFNRFHCHFSPRDWQRLINNN |
| | | WGFRPKRLNFKLFNIQVKEVTDNNGVKTIANNLTSTVQVFTDSDYQLPYVLGSAHEGCLPP |
| | | FPADVFMIPQYGYLTLNDGSQAVGRSSFYCLEYFPSQMLRTGNNFQFSYEFENVPFHSSYA |
| | | HSQSLDRLMNPLIDQYLYYLSKTINGSGQNQQTLKFSVAGPSNMAVQGRNYIPGPSYRQQR |
| | | VSTTVTQNNNSEFAWPGASSWALNGRNSLMNPGPAMASHKEGEDRFFPLSGSLIFGKQGTG |
| | | RDNVDADKVMITNEEEIKTTNPVATESYGQVATNHQSDGTLAVPFKAQAQTGWVQNQGILP |
| | | GMVWQDRDVYLQGPIWAKIPHTDGNFHPSPLMGGFGMKHPPPQILIKNTPVPADPPTAFNK |
| | | DKLNSFITQYSTGQVSVEIEWELQKENSKRWNPEIQYTSNYYKSNNVEFAVNTEGVYSEPR |
| | | PIGTRYLTRNL |
| VOY201 | 3 | MAADGYLPDWLEDNLSEGIREWWALKPGAPQPKANQQHQDNARGLVLPGYKYLGPGNGLDK |
| | | GEPVNAADAAALEHDKAYDQQLKAGDNPYLKYNHADAEFQERLKEDTSFGGNLGRAVFQAK |
| | | KRLLEPLGLVEEAAKTAPGKKRPVEQSPQEPDSSAGIGKSGAQPAKKRLNFGQTGDTESVP |
| | | DPQPIGEPPAAPSGVGSLTMASGGGAPVADNNEGADGVGSSSGNWHCDSQWLGDRVITTST |
| | | RTWALPTYNNHLYKQISNSTSGGSSNDNAYFGYSTPWGYFDFNRFHCHFSPRDWQRLINNN |
| | | WGFRPKRLNFKLFNIQVKEVTDNNGVKTIANNLTSTVQVFTDSDYQLPYVLGSAHEGCLPP |
| | | FPADVFMIPQYGYLTLNDGSQAVGRSSFYCLEYFPSQMLRTGNNFQFSYEFENVPFHSSYA |
| | | HSQSLDRLMNPLIDQYLYYLSKTINGSGQNQQTLKFSVAGPSNMAVQGRNYIPGPSYRQQR |
| | | VSTTVTQNNNSEFAWPGASSWALNGRNSLMNPGPAMASHKEGEDRFFPLSGSLIFGKQGTG |
| | | RDNVDADKVMITNEEEIKTTNPVATESYGQVATNHQSAQTLAVPFKAQAQTGWVQNQGILP |
| | | GMVWQDRDVYLQGPIWAKIPHTDGNFHPSPLMGGFGMKHPPPQILIKNTPVPADPPTAFNK |
| | | DKLNSFITQYSTGQVSVEIEWELQKENSKRWNPEIQYTSNYYKSNNVEFAVNTEGVYSEPR |
| | | PIGTRYLTRNL |
| AAV9/hu. | 11 | MAADGYLPDWLEDNLSEGIREWWALKPGAPQPKANQQHQDNARGLVLPGYKYLGPGNGLDK |
| 14 K449R | | GEPVNAADAAALEHDKAYDQQLKAGDNPYLKYNHADAEFQERLKEDTSFGGNLGRAVFQAK |
| | | KRLLEPLGLVEEAAKTAPGKKRPVEQSPQEPDSSAGIGKSGAQPAKKRLNFGQTGDTESVP |
| | | DPQPIGEPPAAPSGVGSLTMASGGGAPVADNNEGADGVGSSSGNWHCDSQWLGDRVITTST |
| | | RTWALPTYNNHLYKQISNSTSGGSSNDNAYFGYSTPWGYFDFNRFHCHFSPRDWQRLINNN |
| | | WGFRPKRLNFKLFNIQVKEVTDNNGVKTIANNLTSTVQVFTDSDYQLPYVLGSAHEGCLPP |
| | | FPADVFMIPQYGYLTLNDGSQAVGRSSFYCLEYFPSQMLRTGNNFQFSYEFENVPFHSSYA |
| | | HSQSLDRLMNPLIDQYLYYLSRTINGSGQNQQTLKFSVAGPSNMAVQGRNYIPGPSYRQQR |
| | | VSTTVTQNNNSEFAWPGASSWALNGRNSLMNPGPAMASHKEGEDRFFPLSGSLIFGKQGTG |
| | | RDNVDADKVMITNEEEIKTTNPVATESYGQVATNHQSAQAQAQTGWVQNQGILPGMVWQDR |
| | | DVYLQGPIWAKIPHTDGNFHPSPLMGGFGMKHPPPQILIKNTPVPADPPTAFNKDKLNSFI |
| | | TQYSTGQVSVEIEWELQKENSKRWNPEIQYTSNYYKSNNVEFAVNTEGVYSEPRPIGTRYL |
| | | TRNL |
| AAV9/hu. | 138 | MAADGYLPDWLEDNLSEGIREWWALKPGAPQPKANQQHQDNARGLVLPGYKYLGPGNGLDK |
| 14 WT | | GEPVNAADAAALEHDKAYDQQLKAGDNPYLKYNHADAEFQERLKEDTSFGGNLGRAVFQAK |
| (amino | | KRLLEPLGLVEEAAKTAPGKKRPVEQSPQEPDSSAGIGKSGAQPAKKRLNFGQTGDTESVP |
| acid) | | DPQPIGEPPAAPSGVGSLTMASGGGAPVADNNEGADGVGSSSGNWHCDSQWLGDRVITTST |
| | | RTWALPTYNNHLYKQISNSTSGGSSNDNAYFGYSTPWGYFDFNRFHCHFSPRDWQRLINNN |
| | | WGFRPKRLNFKLFNIQVKEVTDNNGVKTIANNLTSTVQVFTDSDYQLPYVLGSAHEGCLPP |
| | | FPADVFMIPQYGYLTLNDGSQAVGRSSFYCLEYFPSQMLRTGNNFQFSYEFENVPFHSSYA |
| | | HSQSLDRLMNPLIDQYLYYLSKTINGSGQNQQTLKFSVAGPSNMAVQGRNYIPGPSYRQQR |
| | | VSTTVTQNNNSEFAWPGASSWALNGRNSLMNPGPAMASHKEGEDRFFPLSGSLIFGKQGTG |
| | | RDNVDADKVMITNEEEIKTTNPVATESYGQVATNHQSAQAQAQTGWVQNQGILPGMVWQDR |
| | | DVYLQGPIWAKIPHTDGNFHPSPLMGGFGMKHPPPQILIKNTPVPADPPTAFNKDKLNSFI |
| | | TQYSTGQVSVEIEWELQKENSKRWNPEIQYTSNYYKSNNVEFAVNTEGVYSEPRPIGTRYL |
| | | TRNL |
| AAV9/hu. | 137 | ATGGCTGCCGATGGTTATCTTCCAGATTGGCTCGAGGACAACCTTAGTGAAGGAATTCGCG |
| 14 WT | | AGTGGTGGGCTTTGAAACCTGGAGCCCCTCAACCCAAGGCAAATCAACAACATCAAGACAA |
| (DNA) | | CGCTCGAGGTCTTGTGCTTCCGGGTTACAAATACCTTGGACCCGGCAACGGACTCGACAAG |
| | | GGGGAGCCGGTCAACGCAGCAGACGCGGCGGCCCTCGAGCACGACAAGGCCTACGACCAGC |
| | | AGCTCAAGGCCGGAGACAACCCGTACCTCAAGTACAACCACGCCGACGCCGAGTTCCAGGA |
| | | GCGGCTCAAAGAAGATACGTCTTTTGGGGGCAACCTCGGGCGAGCAGTCTTCCAGGCCAAA |
| | | AAGAGGCTTCTTGAACCTCTTGGTCTGGTTGAGGAAGCGGCTAAGACGGCTCCTGGAAAGA |
| | | AGAGGCCTGTAGAGCAGTCTCCTCAGGAACCGGACTCCTCCGCGGGTATTGGCAAATCGGG |
| | | TGCACAGCCCGCTAAAAAGAGACTCAATTTCGGTCAGACTGGCGACACAGAGTCAGTCCCA |
| | | GACCCTCAACCAATCGGAGAACCTCCCGCAGCCCCCTCAGGTGTGGGATCTCTTACAATGG |
| | | CTTCAGGTGGTGGCGCACCAGTGGCAGACAATAACGAAGGTGCCGATGGAGTGGGTAGTTC |
| | | CTCGGGAAATTGGCATTGCGATTCCCAATGGCTGGGGGACAGAGTCATCACCACCAGCACC |
| | | CGAACCTGGGCCCTGCCCACCTACAACAATCACCTCTACAAGCAAATCTCCAACAGCACAT |
| | | CTGGAGGATCTTCAAATGACAACGCCTACTTCGGCTACAGCACCCCCTGGGGGTATTTTGA |
| | | CTTCAACAGATTCCACTGCCACTTCTCACCACGTGACTGGCAGCGACTCATCAACAACAAC |
| | | TGGGGATTCCGGCCTAAGCGACTCAACTTCAAGCTCTTCAACATTCAGGTCAAAGAGGTTA |
| | | CGGACAACAATGGAGTCAAGACCATCGCCAATAACCTTACCAGCACGGTCCAGGTCTTCAC |
| | | GGACTCAGACTATCAGCTCCCGTACGTGCTCGGGTCGGCTCACGAGGGCTGCCTCCCGCCG |
| | | TTCCCAGCGGACGTTTTCATGATTCCTCAGTACGGGTATCTGACGCTTAATGATGGAAGCC |
| | | AGGCCGTGGGTCGTTCGTCCTTTTACTGCCTGGAATATTTCCCGTCGCAAATGCTAAGAAC |
| | | GGGTAACAACTTCCAGTTCAGCTACGAGTTTGAGAACGTACCTTTCCATAGCAGCTACGCT |
| | | CACAGCCAAAGCCTGGACCGACTAATGAATCCACTCATCGACCAATACTTGTACTATCTCT |
| | | CAAAGACTATTAACGGTTCTGGACAGAATCAACAAACGCTAAAATTCAGTGTGGCCGGACC |
| | | CAGCAACATGGCTGTCCAGGGAAGAAACTACATACCTGGACCCAGCTACCGACAACAACGT |
| | | GTCTCAACCACTGTGACTCAAAACAACAACAGCGAATTTGCTTGGCCTGGAGCTTCTTCTT |
| | | GGGCTCTCAATGGACGTAATAGCTTGATGAATCCTGGACCTGCTATGGCCAGCCACAAAGA |
| | | AGGAGAGGACCGTTTCTTTCCTTTGTCTGGATCTTTAATTTTTGGCAAACAAGGAACTGGA |
| | | AGAGACAACGTGGATGCGGACAAAGTCATGATAACCAACGAAGAAGAAATTAAAACTACTA |
| | | ACCCGGTAGCAACGGAGTCCTATGGACAAGTGGCCACAAACCACCAGAGTGCCCAAGCACA |
| | | GGCGCAGACCGGCTGGGTTCAAAACCAAGGAATACTTCCGGGTATGGTTTGGCAGGACAGA |
| | | GATGTGTACCTGCAAGGACCCATTTGGGCCAAAATTCCTCACACGGACGGCAACTTTCACC |
| | | CTTCTCCGCTGATGGGAGGGTTTGGAATGAAGCACCCGCCTCCTCAGATCCTCATCAAAAA |
| | | CACACCTGTACCTGCGGATCCTCCAACGGCCTTCAACAAGGACAAGCTGAACTCTTTCATC |
| | | ACCCAGTATTCTACTGGCCAAGTCAGCGTGGAGATCGAGTGGGAGCTGCAGAAGGAAAACA |
| | | GCAAGCGCTGGAACCCGGAGATCCAGTACACTTCCAACTATTACAAGTCTAATAATGTTGA |
| | | ATTTGCTGTTAATACTGAAGGTGTATATAGTGAACCCCGCCCCATTGGCACCAGATACCTG |
| | | ACTCGTAATCTGTAA |
| PHP.B | 12 | MAADGYLPDWLEDNLSEGIREWWALKPGAPQPKANQQHQDNARGLVLPGYKYLGPGNGLDK |
| | | GEPVNAADAAALEHDKAYDQQLKAGDNPYLKYNHADAEFQERLKEDTSFGGNLGRAVFQAK |
| | | KRLLEPLGLVEEAAKTAPGKKRPVEQSPQEPDSSAGIGKSGAQPAKKRLNFGQTGDTESVP |
| | | DPQPIGEPPAAPSGVGSLTMASGGGAPVADNNEGADGVGSSSGNWHCDSQWLGDRVITTST |
| | | RTWALPTYNNHLYKQISNSTSGGSSNDNAYFGYSTPWGYFDFNRFHCHFSPRDWQRLINNN |
| | | WGFRPKRLNFKLFNIQVKEVTDNNGVKTIANNLTSTVQVFTDSDYQLPYVLGSAHEGCLPP |
| | | FPADVFMIPQYGYLTLNDGSQAVGRSSFYCLEYFPSQMLRTGNNFQFSYEFENVPFHSSYA |
| | | HSQSLDRLMNPLIDQYLYYLSRTINGSGQNQQTLKFSVAGPSNMAVQGRNYIPGPSYRQQR |
| | | VSTTVTQNNNSEFAWPGASSWALNGRNSLMNPGPAMASHKEGEDRFFPLSGSLIFGKQGTG |
| | | RDNVDADKVMITNEEEIKTTNPVATESYGQVATNHQSAQTLAVPFKAQAQTGWVQNQGILP |
| | | GMVWQDRDVYLQGPIWAKIPHTDGNFHPSPLMGGFGMKHPPPQILIKNTPVPADPPTAFNK |
| | | DKLNSFITQYSTGQVSVEIEWELQKENSKRWNPEIQYTSNYYKSNNVEFAVNTEGVYSEPR |
| | | PIGTRYLTRNL |
| PHP.N | 13 | MAADGYLPDWLEDNLSEGIREWWALKPGAPQPKANQQHQDNARGLVLPGYKYLGPGNGLDK |
| | | GEPVNAADAAALEHDKAYDQQLKAGDNPYLKYNHADAEFQERLKEDTSFGGNLGRAVFQAK |
| | | KRLLEPLGLVEEAAKTAPGKKRPVEQSPQEPDSSAGIGKSGAQPAKKRLNFGQTGDTESVP |
| | | DPQPIGEPPAAPSGVGSLTMASGGGAPVADNNEGADGVGSSSGNWHCDSQWLGDRVITTST |
| | | RTWALPTYNNHLYKQISNSTSGGSSNDNAYFGYSTPWGYFDFNRFHCHFSPRDWQRLINNN |
| | | WGFRPKRLNFKLFNIQVKEVTDNNGVKTIANNLTSTVQVFTDSDYQLPYVLGSAHEGCLPP |
| | | FPADVFMIPQYGYLTLNDGSQAVGRSSFYCLEYFPSQMLRTGNNFQFSYEFENVPFHSSYA |
| | | HSQSLDRLMNPLIDQYLYYLSRTINGSGQNQQTLKFSVAGPSNMAVQGRNYIPGPSYRQQR |
| | | VSTTVTQNNNSEFAWPGASSWALNGRNSLMNPGPAMASHKEGEDRFFPLSGSLIFGKQGTG |
| | | RDNVDADKVMITNEEEIKTTNPVATESYGQVATNHQSDGTLAVPFKAQAQTGWVQNQGILP |
| | | GMVWQDRDVYLQGPIWAKIPHTDGNFHPSPLMGGFGMKHPPPQILIKNTPVPADPPTAFNK |
| | | DKLNSFITQYSTGQVSVEIEWELQKENSKRWNPEIQYTSNYYKSNNVEFAVNTEGVYSEPR |
| | | PIGTRYLTRNL |

### Viral Genome of the AAV Particle

[1789] In some embodiments, an AAV particle as described herein comprising an AAV capsid polypeptide, e.g., AAV capsid variant, described herein, may be used for the delivery of a viral genome to a tissue (e.g., CNS, DRG, and/or muscle). In some embodiments, an AAV particle comprising an AAV capsid polypeptide, e.g., an AAV capsid variant, described herein can be used for delivery of a viral genome to a tissue or cell, e.g., CNS, DRG, or muscle cell or tissue. In some embodiments, an AAV particle of the present disclosure is a recombinant AAV particle. In some embodiments, an AAV particle of the present disclosure is an isolated AAV particle.

[1790] The viral genome may encode any payload, such as but not limited to a polypeptide (e.g., a therapeutic polypeptide), an antibody, an enzyme, an RNAi agent and/or components of a gene editing system. In one embodiment, the AAV particles described herein are used to deliver a payload to cells of the CNS, after intravenous delivery. In another embodiment, the AAV particles described herein are used to deliver a payload to cells of the DRG, after intravenous delivery. In some embodiments, the AAV particles described herein are used to deliver a payload to cells of a muscle, e.g., a heart muscle, after intravenous delivery.

[1791] In some embodiments, a viral genome of an AAV particle comprising an AAV capsid polypeptide, e.g., an AAV capsid variant, as described herein, comprises a nucleic acid comprising a transgene encoding a payload In some embodiments, the viral genome comprises an inverted terminal repeat (ITR) sequence. In some embodiments, the viral genome comprises two ITR sequences, e.g., one at the 5′ end of the viral genome (e.g., 5′ relative to the encoded payload) and one at the 3′ end of the viral genome (e.g., 3′ relative to the encoded payload). In some embodiments, a viral genome of the AAV particles described herein (e.g., comprising an AAV capsid variant described herein) may comprise a regulatory element (e.g., promoter), untranslated regions (UTR), a miR binding site a polyadenylation sequence (polyA), a filler or stuffer sequence, an intron, and/or a linker sequence, e.g., for enhancing transgene expression.

[1792] In some embodiments, the viral genome components are selected and/or engineered for expression of a payload in a target tissue (e.g., a CNS tissue, a muscle tissue (e.g., heart), or DRG).

### Viral Genome Component: Inverted Terminal Repeats (ITRs)

[1793] In some embodiments, the AAV particle comprising an AAV capsid polypeptide, e.g., an AAV capsid variant, described herein comprises a viral genome comprising an ITR and a transgene encoding a payload. In some embodiment, the viral genome has two ITRs. In some embodiments, the two ITRs flank the nucleotide sequence encoding the payload at the 5′ and 3′ ends. In some embodiments, the ITRs function as origins of replication comprising recognition sites for replication. In some embodiments, the ITRs comprise sequence regions which can be complementary and symmetrically arranged. In some embodiments, the ITRs incorporated into viral genomes as described herein may be comprised of naturally occurring polynucleotide sequences or recombinantly derived polynucleotide sequences.

[1794] In some embodiments, the ITR may be of the same serotype as the capsid polypeptide, e.g., capsid variant, selected from any of the known serotypes, or a variant thereof. In some embodiments, the ITR may be of a different serotype than the capsid. In one embodiment, the viral genome comprises two ITR sequence regions, wherein the ITRs are of the same serotype as one another. In another embodiment, the viral genome comprises two ITR sequence regions, wherein the ITRs are of different serotypes. Non-limiting examples include zero, one or both of the ITRs having the same serotype as the capsid. In one embodiment both ITRs of the viral genome of the AAV particle are AAV2 ITRs.

[1795] Independently, each ITR may be about 100 to about 150 nucleotides in length. An ITR may be about 100-105 nucleotides in length, 106-110 nucleotides in length, 111-115 nucleotides in length, 116-120 nucleotides in length, 121-125 nucleotides in length, 126-130 nucleotides in length, 131-135 nucleotides in length, 136-140 nucleotides in length, 141-145 nucleotides in length or 146-150 nucleotides in length. In one embodiment, the ITRs are 140-142 nucleotides in length. Non-limiting examples of ITR length are 102, 105, 130, 140, 141, 142, 145 nucleotides in length.

### Viral Genome Component: Promoters

[1796] In one embodiment, the payload region of the viral genome comprises at least one element to enhance the payload target specificity and expression (See e.g., Powell et al. Viral Expression Cassette Elements to Enhance Transgene Target Specificity and Expression in Gene Therapy, 2015; the contents of which are herein incorporated by reference in their entirety). Non-limiting examples of elements to enhance payload target specificity and expression include promoters, endogenous miRNAs, post-transcriptional regulatory elements (PREs), polyadenylation (PolyA) signal sequences and upstream enhancers (USEs), CMV enhancers and introns.

[1797] In some embodiments, an AAV particle comprising an AAV capsid variant described herein comprises a viral genome comprising a nucleic acid comprising a transgene encoding a payload, wherein the transgene is operably linked to a promoter. In some embodiments, the promoter is a species specific promoter, an inducible promoter, tissue-specific, or cell cycle-specific (Parr et al., Nat. Med. 3:1145-9 (1997); the contents of which are herein incorporated by reference in their entirety).

[1798] In some embodiments the promoter may be naturally occurring or non-naturally occurring. Non-limiting examples of promoters include those from viruses, plants, mammals, or humans. In some embodiments, the promoters may be those from human cells or systems. In some embodiments, the promoter may be truncated or mutated, e.g., a promoter variant.

[1799] In some embodiments, the promoter is a ubiquitous promoter, e.g., capable of expression in multiple tissues. In some embodiments the promoter is an human elongation factor 1α-subunit (EF1α) promoter, the cytomegalovirus (CMV) immediate-early enhancer and/or promoter, the chicken β-actin (CBA) promoter and its derivative CAG, β glucuronidase (GUSB) promoter, or ubiquitin C (UBC) promoter. In some embodiments, the promoter is a cell or tissue specific promoter, e.g., capable of expression in tissues or cells of the central or peripheral nervous systems, regions within (e.g., frontal cortex), and/or sub-sets of cells therein (e.g., excitatory neurons). In some embodiments, the promoter is a cell-type specific promoter capable of expression a payload in excitatory neurons (e.g., glutamatergic), inhibitory neurons (e.g., GABA-ergic), neurons of the sympathetic or parasympathetic nervous system, sensory neurons, neurons of the dorsal root ganglia, motor neurons, or supportive cells of the nervous systems such as microglia, astrocytes, oligodendrocytes, and/or Schwann cells.

[1800] In some embodiments, the promoter is a liver promoter (e.g., hAAT, TBG), skeletal muscle specific promoter (e.g., desmin, MCK, C512), B cell promoter, monocyte promoter, leukocyte promoter, macrophage promoter, pancreatic acinar cell promoter, endothelial cell promoter, lung tissue promoter, and/or cardiac or cardiovascular promoter (e.g., αMHC, cTnT, and CMV-MLC2k).

[1801] In some embodiments, the promoter is a tissue-specific promoter for payload expression in a cell or tissue of the central nervous system. In some embodiments, the promoter is synapsin (Syn) promoter, glutamate vesicular transporter (VGLUT) promoter, vesicular GABA transporter (VGAT) promoter, parvalbumin (PV) promoter, sodium channel Na, 1.8 promoter, tyrosine hydroxylase (TH) promoter, choline acetyltransferase (ChaT) promoter, methyl-CpG binding protein 2 (MeCP2) promoter, Ca²⁺/calmodulin-dependent protein kinase II (CaMKII) promoter, metabotropic glutamate receptor 2 (mGluR2) promoter, neurofilament light (NFL) or heavy (NFH) promoter, neuron-specific enolase (NSE) promoter, β-globin minigene nβ2 promoter, preproenkephalin (PPE) promoter, enkephalin (Enk) promoter, and excitatory amino acid transporter 2 (EAAT2) promoter. In some embodiments, the promoter is a cell-type specific promoter capable of expression in an astrocyte, e.g., a glial fibrillary acidic protein (GFAP) promoter and a EAAT2 promoter. In some embodiments, the promoter is a cell-type specific promoter capable of expression in an oligodendrocyte, e.g., a myelin basic protein (MBP) promoter.

[1802] In some embodiments, the promoter is a GFAP promoter. In some embodiments, the promoter is a synapsin (syn or syn1) promoter, or a fragment thereof.

[1803] In some embodiments, the promoter comprises an insulin promoter or a fragment thereof.

[1804] In some embodiments, the promoter of the viral genome described herein (e.g., comprised within an AAV particle comprising an AAV capsid variant described herein) comprises an EF-1α promoter or variant thereof, e.g., as provided in Table 12. In some embodiments, the EF-1α promoter comprises the nucleotide sequence of any one of SEQ ID NOs: 19, 20, 22, 23, 27, 28, 30-39 or any one of the sequences provided in Table 12, a nucleotide sequence comprising at least one, two, or three but no more than four modifications, e.g., substitutions, relative to the nucleotide sequence of SEQ ID NOs: 19, 20, 22, 23, 27, 28, 30-39 or any one of the sequences provided in Table 12, or a nucleotide sequence with at least 70% (e.g., 80, 85%, 90%, 95%, 96%, 97%, 98%, or 99%) sequence identity to any one of SEQ ID NOs: 19, 20, 22, 23, 27, 28, 30-39 or any one of the sequences provided in Table 12.

TABLE 12
Exemplary Promoter Variants

| | | SEQ |
|---|---|---|
| | | ID |
| Description | Sequences | NO: |
| EF1a Promoter | CGTGAGGCTCCGGTGCCCGTCAGTGGGCAGAGCGCACATCGCCCACAGTCCCCGAGA | 19 |
| (intron | AGTTGGGGGGAGGGGTCGGCAATTGAACCGGTGCCTAGAGAAGGTGGCGCGGGGTAA | |
| underlined) | ACTGGGAAAGTGATGTCGTGTACTGGCTCCGCCTTTTTCCCGAGGGTGGGGGAGAAC | |
| | CGTATATAAGTGCAGTAGTCGCCGTGAACGTTCTTTTTCGCAACGGGTTTGCCGCCA | |
| | GAACACAGGTAAGTGCCGTGTGTGGTTCCCGCGGGCCTGGCCTCTTTACGGGTTATG | |
| | GCCCTTGCGTGCCTTGAATTACTTCCACCTGGCTGCAGTACGTGATTCTTGATCCCG | |
| | AGCTTCGGGTTGGAAGTGGGTGGGAGAGTTCGAGGCCTTGCGCTTAAGGAGCCCCTT | |
| | CGCCTCGTGCTTGAGTTGAGGCCTGGCCTGGGCGCTGGGGCCGCCGCGTGCGAATCT | |
| | GGTGGCACCTTCGCGCCTGTCTCGCTGCTTTCGATAAGTCTCTAGCCATTTAAAATT | |
| | TTTGATGACCTGCTGCGACGCTTTTTTTCTGGCAAGATAGTCTTGTAAATGCGGGCC | |
| | AAGATCTGCACACTGGTATTTCGGTTTTTGGGGCCGCGGGCGGCGACGGGGCCCGTG | |
| | CGTCCCAGCGCACATGTTCGGCGAGGCGGGGCCTGCGAGCGCGGCCACCGAGAATCG | |
| | GACGGGGGTAGTCTCAAGCTGGCCGGCCTGCTCTGGTGCCTGGCCTCGCGCCGCCGT | |
| | GTATCGCCCCGCCCTGGGCGGCAAGGCTGGCCCGGTCGGCACCAGTTGCGTGAGCGG | |
| | AAAGATGGCCGCTTCCCGGCCCTGCTGCAGGGAGCTCAAAATGGAGGACGCGGCGCT | |
| | CGGGAGAGCGGGCGGGTGAGTCACCCACACAAAGGAAAAGGGCCTTTCCGTCCTCAG | |
| | CCGTCGCTTCATGTGACTCCACGGAGTACCGGGCGCCGTCCAGGCACCTCGATTAGT | |
| | TCTCGAGCTTTTGGAGTACGTCGTCTTTAGGTTGGGGGGAGGGGTTTTATGCGATGG | |
| | AGTTTCCCCACACTGAGTGGGTGGAGACTGAAGTTAGGCCAGCTTGGCACTTGATGT | |
| | AATTCTCCTTGGAATTTGCCCTTTTTGAGTTTGGATCTTGGTTCATTCTCAAGCCTC | |
| | AGACAGTGGTTCAAAGTTTTTTTCTTCCATTTCAGGTGTCGTGA | |
| miniEF1a | GCCCGTCAGTGGGCAGAGCGCACATCGCCCACAGTCCCCGAGAAGTTGGGGGGAGGG | 20 |
| | GTCGGCAATTGAACCGGTGCCTAGAGAAGGTGGCGCGGGGTAAACTGGGAAAGTGAT | |
| | GTCGTGTACTGGCTCCGCCTTTTTCCCGAGGGTGGGGGAGAACCGTATATAAGTGCA | |
| | GTAGTCGCCGTGAACGTTCTTTTTCGCAACGGGTTTGCCGCCAGAACACGCGTAAG | |
| Promoter | GCATG | |
| Variant 1 | | |
| Promoter | GGTGGAGAAGAGCATG | 22 |
| Variant 2 | | |
| Promoter | GTCATCACTGAGGTGGAGAAGAGCATG | 23 |
| Variant 3 | | |
| Promoter | CGTGAG | |
| Variant 4 | | |
| Promoter | GT | |
| Variant 5 | | |
| Promoter | GCTCCGGT | |
| Variant 6 | | |
| Promoter | GCCCGTCAGTGGGCAGAGCGCACATCGCCCACAGTCCCCGAGAAGTTGGGGGGAGGG | 27 |
| Variant | GTCGGCAATTGAACCGGTGCCTAGAGAAGGTGGCGCGGGGTAAACTGGGAAAGTGAT | |
| 19 | GTCGTGTACTGGCTCCGCCTTTTTCCCGAGGGTGGGGGAGAACCGTATATAAGTGCA | |
| | GTAGTCGCCGTGAACGTTCTTTTTCGCAACGGGTTTGCCGCCAGAACACAG | |
| Promoter | GCCCGTCAGTGGGCAGAGCGCACATCGCCCACAGTCCCCGAGAAGTTGGGGGGAGGG | 28 |
| Variant | GTCGGCAATTGAACCGGTGCCTAGAGAAGGTGGCGCGGGGTAAACTGGGAAAGTGAT | |
| 20 | GTCGTGTACTGGCTCCGCCTTTTTCCCGAGGGTGGGGGAGAACCGTATATAAGTGCA | |
| | GTAGTCGCCGTGAACGTTCTTTTTCGCAACGGGTTTGCCGCCAGAACACGC | |
| Promoter | GTAAG | |
| Variant 7 | | |
| Promoter | GTGCCCGTCAGTGGGCAGAGCGCACATCGCCCACAGTCCCCGAGAAGTTGGGGGGAG | 30 |
| Variant | GGGTCGGCAATTGAACCGGTGCCTAGAGAAGGTGGCGCGGGGTAAACTGGGAAAGTG | |
| 8 | ATGTCGTGTACTGGCTCCGCCTTTTTCCCGAGGGTGGGGGAGAACCGTATATAAGTG | |
| | CAGTAGTCGCCGTGAACGTTCTTTTTCGCAACGGGTTTGCCGCCAGAACACGCGTAA | |
| | G | |
| Promoter | GCTCCGGTGCCCGTCAGTGGGCAGAGCGCACATCGCCCACAGTCCCCGAGAAGTTGG | 31 |
| Variant | GGGGAGGGGTCGGCAATTGAACCGGTGCCTAGAGAAGGTGGCGCGGGGTAAACTGGG | |
| 9 | AAAGTGATGTCGTGTACTGGCTCCGCCTTTTTCCCGAGGGTGGGGGAGAACCGTATA | |
| | TAAGTGCAGTAGTCGCCGTGAACGTTCTTTTTCGCAACGGGTTTGCCGCCAGAACAC | |
| | GCGTAAG | |
| Promoter | CGTGAGGCTCCGGTGCCCGTCAGTGGGCAGAGCGCACATCGCCCACAGTCCCCGAGA | 32 |
| Variant | AGTTGGGGGGAGGGGTCGGCAATTGAACCGGTGCCTAGAGAAGGTGGCGCGGGGTAA | |
| 10 | ACTGGGAAAGTGATGTCGTGTACTGGCTCCGCCTTTTTCCCGAGGGTGGGGGAGAAC | |
| | CGTATATAAGTGCAGTAGTCGCCGTGAACGTTCTTTTTCGCAACGGGTTTGCCGCCA | |
| | GAACACGCGTAAG | |
| Promoter | CGTGAGGCTCCGGTGCCCGTCAGTGGGCAGAGCGCACATCGCCCACAGTCCCCGAGA | 33 |
| Variant | AGTTGGGGGGAGGGGTCGGCAATTGAACCGGTGCCTAGAGAAGGTGGCGCGGGGTAA | |
| 11 | ACTGGGAAAGTGATGTCGTGTACTGGCTCCGCCTTTTTCCCGAGGGTGGGGGAGAAC | |
| | CGTATATAAGTGCAGTAGTCGCCGTGAACGTTCTTTTTCGCAACGGGTTTGCCGCCA | |
| | GAACACAG | |
| Promoter | GCATGCGTGAGGCTCCGGTGCCCGTCAGTGGGCAGAGCGCACATCGCCCACAGTCCC | 34 |
| Variant | CGAGAAGTTGGGGGGAGGGGTCGGCAATTGAACCGGTGCCTAGAGAAGGTGGCGCGG | |
| 12 | GGTAAACTGGGAAAGTGATGTCGTGTACTGGCTCCGCCTTTTTCCCGAGGGTGGGGG | |
| | AGAACCGTATATAAGTGCAGTAGTCGCCGTGAACGTTCTTTTTCGCAACGGGTTTGC | |
| | CGCCAGAACACGCGTAAG | |
| Promoter | GCATGCGTGAGGCTCCGGTGCCCGTCAGTGGGCAGAGCGCACATCGCCCACAGTCCC | 35 |
| Variant | CGAGAAGTTGGGGGGAGGGGTCGGCAATTGAACCGGTGCCTAGAGAAGGTGGCGCGG | |
| 13 | GGTAAACTGGGAAAGTGATGTCGTGTACTGGCTCCGCCTTTTTCCCGAGGGTGGGGG | |
| | AGAACCGTATATAAGTGCAGTAGTCGCCGTGAACGTTCTTTTTCGCAACGGGTTTGC | |
| | CGCCAGAACACAG | |
| Promoter | GGTGGAGAAGAGCATGCGTGAGGCTCCGGTGCCCGTCAGTGGGCAGAGCGCACATCG | 36 |
| Variant | CCCACAGTCCCCGAGAAGTTGGGGGGAGGGGTCGGCAATTGAACCGGTGCCTAGAGA | |
| 14 | AGGTGGCGCGGGGTAAACTGGGAAAGTGATGTCGTGTACTGGCTCCGCCTTTTTCCC | |
| | GAGGGTGGGGGAGAACCGTATATAAGTGCAGTAGTCGCCGTGAACGTTCTTTTTCGC | |
| | AACGGGTTTGCCGCCAGAACACGCGTAAG | |
| Promoter | GGTGGAGAAGAGCATGCGTGAGGCTCCGGTGCCCGTCAGTGGGCAGAGCGCACATCG | 37 |
| Variant | CCCACAGTCCCCGAGAAGTTGGGGGGAGGGGTCGGCAATTGAACCGGTGCCTAGAGA | |
| 15 | AGGTGGCGCGGGGTAAACTGGGAAAGTGATGTCGTGTACTGGCTCCGCCTTTTTCCC | |
| | GAGGGTGGGGGAGAACCGTATATAAGTGCAGTAGTCGCCGTGAACGTTCTTTTTCGC | |
| | AACGGGTTTGCCGCCAGAACACAG | |
| Promoter | GTCATCACTGAGGTGGAGAAGAGCATGCGTGAGGCTCCGGTGCCCGTCAGTGGGCAG | 38 |
| Variant | AGCGCACATCGCCCACAGTCCCCGAGAAGTTGGGGGGAGGGGTCGGCAATTGAACCG | |
| 16 | GTGCCTAGAGAAGGTGGCGCGGGGTAAACTGGGAAAGTGATGTCGTGTACTGGCTCC | |
| | GCCTTTTTCCCGAGGGTGGGGGAGAACCGTATATAAGTGCAGTAGTCGCCGTGAACG | |
| | TTCTTTTTCGCAACGGGTTTGCCGCCAGAACACGCGTAAG | |
| Promoter | GTCATCACTGAGGTGGAGAAGAGCATGCGTGAGGCTCCGGTGCCCGTCAGTGGGCAG | 39 |
| Variant 18 | AGCGCACATCGCCCACAGTCCCCGAGAAGTTGGGGGGAGGGGTCGGCAATTGAACCG | |
| | GTGCCTAGAGAAGGTGGCGCGGGGTAAACTGGGAAAGTGATGTCGTGTACTGGCTCC | |
| | GCCTTTTTCCCGAGGGTGGGGGAGAACCGTATATAAGTGCAGTAGTCGCCGTGAACG | |
| | TTCTTTTTCGCAACGGGTTTGCCGCCAGAACACAG | |

### Viral Genome Component: Untranslated Regions (UTRs)

[1805] In some embodiments, wild type untranslated regions (UTRs) of a gene are transcribed but not translated. Generally, the 5′ UTR starts at the transcription start site and ends at the start codon and the 3′ UTR starts immediately following the stop codon and continues until the termination signal for transcription.

[1806] Features typically found in abundantly expressed genes of specific target organs (e.g., CNS tissue, muscle, or DRG) may be engineered into UTRs to enhance stability and protein production. As a non-limiting example, a 5′ UTR from mRNA normally expressed in the brain (e.g., huntingtin) may be used in the viral genomes of the AAV particles described herein to enhance expression in neuronal cells or other cells of the central nervous system.

[1807] While not wishing to be bound by theory, wild-type 5′ untranslated regions (UTRs) include features which play roles in translation initiation. Kozak sequences, which are commonly known to be involved in the process by which the ribosome initiates translation of many genes, are usually included in 5′ UTRs. Kozak sequences have the consensus CCR(A/G)CCAUGG, where R is a purine (adenine or guanine) three bases upstream of the start codon (ATG), which is followed by another ‘G’.

[1808] In one embodiment, the 5′UTR in the viral genome includes a Kozak sequence.

[1809] In one embodiment, the 5′UTR in the viral genome does not include a Kozak sequence.

[1810] While not wishing to be bound by theory, wild-type 3′ UTRs are known to have stretches of Adenosines and Uridines embedded therein. These AU rich signatures are particularly prevalent in genes with high rates of turnover. Based on their sequence features and functional properties, the AU rich elements (AREs) can be separated into three classes (Chen et al, 1995, the contents of which are herein incorporated by reference in its entirety): Class I AREs, such as, but not limited to, c-Myc and MyoD, contain several dispersed copies of an AUUUA motif within U-rich regions. Class II AREs, such as, but not limited to, GM-CSF and TNF-α, possess two or more overlapping UUAUUUA(U/A)(U/A) nonamers. Class III ARES, such as, but not limited to, c-Jun and Myogenin, are less well defined. These U rich regions do not contain an AUUUA motif. Most proteins binding to the AREs are known to destabilize the messenger, whereas members of the ELAV family, most notably HuR, have been documented to increase the stability of mRNA. HuR binds to AREs of all the three classes. Engineering the HuR specific binding sites into the 3′ UTR of nucleic acid molecules will lead to HuR binding and thus, stabilization of the message in vivo.

[1811] Introduction, removal or modification of 3′ UTR AU rich elements (AREs) can be used to modulate the stability of a polynucleotide. When engineering specific polynucleotides, e.g., payload regions of viral genomes, one or more copies of an ARE can be introduced to make polynucleotides less stable and thereby curtail translation and decrease production of the resultant protein. Likewise, AREs can be identified and removed or mutated to increase the intracellular stability and thus increase translation and production of the resultant protein.

[1812] In one embodiment, the 3′ UTR of the viral genome may include an oligo(dT) sequence for templated addition of a poly-A tail.

[1813] In one embodiment, the viral genome may include at least one miRNA seed, binding site or full sequence. microRNAs (or miRNA or miR) are 19-25 nucleotide noncoding RNAs that bind to the sites of nucleic acid targets and down-regulate gene expression either by reducing nucleic acid molecule stability or by inhibiting translation. In some embodiments, a microRNA sequence comprises a seed region, e.g., a sequence in the region of positions 2-8 of the mature microRNA, which has Watson-Crick sequence fully or partially complementarity to the miRNA target sequence of the nucleic acid.

[1814] In one embodiment, the viral genome may be engineered to include, alter or remove at least one miRNA binding site, full sequence or seed region.

[1815] Any UTR from any gene known in the art may be incorporated into the viral genome of the AAV particle. These UTRs, or portions thereof, may be placed in the same orientation as in the gene from which they were selected or they may be altered in orientation or location. In one embodiment, the UTR used in the viral genome of the AAV particle may be inverted, shortened, lengthened, made with one or more other 5′ UTRs or 3′ UTRs known in the art. As used herein, the term “altered” as it relates to a UTR, means that the UTR has been changed in some way in relation to a reference sequence. For example, a 3′ or 5′ UTR may be altered relative to a wild type or native UTR by the change in orientation or location as taught above or may be altered by the inclusion of additional nucleotides, deletion of nucleotides, swapping or transposition of nucleotides.

[1816] In one embodiment, the viral genome of the AAV particle comprises at least one artificial UTR which is not a variant of a wild type UTR.

[1817] In one embodiment, the viral genome of the AAV particle comprises UTRs which have been selected from a family of transcripts whose proteins share a common function, structure, feature or property.

### Viral Genome Component: Polyadenylation Sequence

[1818] The viral genome of the AAV particle described herein (e.g., an AAV particle comprising an AAV capsid polypeptide, e.g., an AAV capsid variant, described herein) may comprise a polyadenylation sequence. In some embodiments, the viral genome of the AAV particle (e.g., an AAV particle comprising an AAV capsid polypeptide, e.g., an AAV capsid variant, described herein) comprises a polyadenylation sequence between the 3′ end of the nucleotide sequence encoding the payload and the 5′ end of the 3′ITR.

### Viral Genome Component: Introns

[1819] In some embodiments, the viral genome of the AAV particle as described herein (e.g., an AAV particle comprising an AAV capsid polypeptide, e.g., an AAV capsid variant), comprises an element to enhance the payload target specificity and expression (See e.g., Powell et al. Viral Expression Cassette Elements to Enhance Transgene Target Specificity and Expression in Gene Therapy, Discov. Med, 2015, 19(102): 49-57; the contents of which are herein incorporated by reference in their entirety) such as an intron. Non-limiting examples of introns include, MVM (67-97 bps), FIX truncated intron 1 (300 bps), β-globin SD/immunoglobulin heavy chain splice acceptor (250 bps), adenovirus splice donor/immunoglobin splice acceptor (500 bps), SV40 late splice donor/splice acceptor (19S/16S) (180 bps) and hybrid adenovirus splice donor/IgG splice acceptor (230 bps).

### Viral Genome Component: Stuffer Sequences

[1820] In some embodiments, the viral genome of an AAV particle described herein (e.g., an AAV particle comprising an AAV capsid polypeptide, e.g., an AAV capsid variant), comprises an element to improve packaging efficiency and expression, such as a stuffer or filler sequence. Non-limiting examples of stuffer sequences include albumin and/or alpha-1 antitrypsin. Any known viral, mammalian, or plant sequence may be manipulated for use as a stuffer sequence.

[1821] In one embodiment, the stuffer or filler sequence may be from about 100-3500 nucleotides in length. The stuffer sequence may have a length of about 100, 200, 300, 400, 500, 600, 700, 800, 900, 1000, 1100, 1200, 1300, 1400, 1500, 1600, 1700, 1800, 1900, 2000, 2100, 2200, 2300, 2400, 2500, 2600, 2700, 2800, 2900 or 3000 nucleotides.

Viral Genome Component: miRNA

[1822] In some embodiments, the viral genome comprises a sequence encoding a miRNA to reduce the expression of the payload in a tissue or cell, e.g., the DRG (dorsal root ganglion), or neurons of other ganglia, such as those of the sympathetic or parasympathetic nervous system. In some embodiments, a miRNA, e.g., a miR183, a miR182, and/or miR96, may be encoded in the viral genome to modulate, e.g., reduce the expression, of the viral genome in a DRG neuron. As another non-limiting example, a miR-122 miRNA may be encoded in the viral genome to modulate, e.g., reduce, the expression of the viral genome in the liver. In some embodiments, a miRNA, e.g., a miR-142-3p, may be encoded in the viral genome to modulate, e.g., reduce, the expression, of the viral genome in a cell or tissue of the hematopoietic lineage, including for example immune cells (e.g., antigen presenting cells or APC, including dendritic cells (DCs), macrophages, and B-lymphocytes). In some embodiments, a miRNA, e.g., a miR-1, may be encoded in the viral genome to modulate, e.g., reduce, the expression, of the viral genome in a cell or tissue of the heart.

### Viral Genome Component: miR Binding Site

[1823] Tissue- or cell-specific expression of the AAV viral particles disclosed herein can be enhanced by introducing tissue- or cell-specific regulatory sequences, e.g., promoters, enhancers, microRNA binding sites, e.g., a detargeting site. Without wishing to be bound by theory, it is believed that an encoded miR binding site can modulate, e.g., prevent, suppress, or otherwise inhibit, the expression of a gene of interest on the viral genome disclosed herein, based on the expression of the corresponding endogenous microRNA (miRNA) or a corresponding controlled exogenous miRNA in a tissue or cell, e.g., a non-targeting cell or tissue. In some embodiments, a miR binding site modulates, e.g., reduces, expression of the payload encoded by a viral genome of an AAV particle described herein in a cell or tissue where the corresponding mRNA is expressed.

[1824] In some embodiments, the viral genome of an AAV particle described herein comprises a nucleotide sequence encoding a microRNA binding site, e.g., a detargeting site. In some embodiments, the viral genome of an AAV particle described herein comprises a nucleotide sequence encoding a miR binding site, a microRNA binding site series (miR BSs), or a reverse complement thereof.

[1825] In some embodiments, the nucleotide sequence encoding the miR binding site series or the miR binding site is located in the 3′-UTR region of the viral genome (e.g., 3′ relative to the nucleotide sequence encoding a payload), e.g., before the polyA sequence, 5′-UTR region of the viral genome (e.g., 5′ relative to the nucleotide sequence encoding a payload), or both.

[1826] In some embodiments, the encoded miR binding site series comprise at least 1-5 copies, e.g., at least 1-3, 2-4, 3-5, 1, 2, 3, 4, 5 or more copies of a miR binding site (miR BS). In some embodiments, all copies are identical, e.g., comprise the same miR binding site. In some embodiments, the miR binding sites within the encoded miR binding site series are continuous and not separated by a spacer. In some embodiments, the miR binding sites within an encoded miR binding site series are separated by a spacer, e.g., a non-coding sequence. In some embodiments, the spacer is about 1 to 6 nucleotides or about 5 to 10 nucleotides, e.g., about 7-8 nucleotides, nucleotides in length. In some embodiments, the spacer coding sequence or reverse complement thereof comprises one or more of (i) GGAT; (ii) CACGTG; (iii) GCATGC, or a repeat of one or more of (i)-(iii). In some embodiments, the spacer comprises the nucleotide sequence of GATAGTTA, or a nucleotide sequence having at least one, two, or three modifications, e.g., substitutions (e.g., conservative substitutions), insertions, or deletions, but no more than four modifications, e.g., substitutions (e.g., conservative substitutions), insertions, or deletions, of GATAGTTA.

[1827] In some embodiments, the encoded miR binding site series comprise at least 1-5 copies, e.g., at least 1-3, 2-4, 3-5, 1, 2, 3, 4, 5 or more copies of a miR binding site (miR BS). In some embodiments, at least 1, 2, 3, 4, 5, or all of the copies are different, e.g., comprise a different miR binding site. In some embodiments, the miR binding sites within the encoded miR binding site series are continuous and not separated by a spacer. In some embodiments, the miR binding sites within an encoded miR binding site series are separated by a spacer, e.g., a non-coding sequence. In some embodiments, the spacer is about 1 to 6 nucleotides or about 5 to 10 nucleotides, e.g., about 7-8 nucleotides, in length. In some embodiments, the spacer comprises one or more of (i) GGAT; (ii) CACGTG; (iii) GCATGC, or a repeat of one or more of (i)-(iii). In some embodiments, the spacer comprises the nucleotide sequence of GATAGTTA, or a nucleotide sequence having at least one, two, or three modifications, e.g., substitutions (e.g., conservative substitutions), insertions, or deletions, but no more than four modifications, e.g., substitutions (e.g., conservative substitutions), insertions, or deletions, of GATAGTTA.

[1828] In some embodiments, the encoded miR binding site is substantially identical (e.g., at least 70%, 75%, 80%, 85%, 90%, 95%, 99% or 100% identical), to the miR in the host cell. In some embodiments, the encoded miR binding site comprises at least 1, 2, 3, 4, or 5 mismatches or no more than 6, 7, 8, 9, or 10 mismatches to a miR in the host cell. In some embodiments, the mismatched nucleotides are contiguous. In some embodiments, the mismatched nucleotides are non-contiguous. In some embodiments, the mismatched nucleotides occur outside the seed region-binding sequence of the miR binding site, such as at one or both ends of the miR binding site. In some embodiments, the miR binding site is 100% identical to the miR in the host cell.

[1829] In some embodiments, the nucleotide sequence encoding the miR binding site is substantially complimentary (e.g., at least 70%, 75%, 80%, 85%, 90%, 95%, 99% or 100% complimentary), to the miR in the host cell. In some embodiments, to complementary sequence of the nucleotide sequence encoding the miR binding site comprises at least 1, 2, 3, 4, or 5 mismatches or no more than 6, 7, 8, 9, or 10 mismatches to a miR in the host cell. In some embodiments, the mismatched nucleotides are contiguous. In some embodiments, the mismatched nucleotides are non-contiguous. In some embodiments, the mismatched nucleotides occur outside the seed region-binding sequence of the miR binding site, such as at one or both ends of the miR binding site. In some embodiments, the encoded miR binding site is 100% complimentary to the miR in the host cell.

[1830] In some embodiments, an encoded miR binding site or sequence region is at least about 10 to about 125 nucleotides in length, e.g., at least about 10 to 50 nucleotides, 10 to 100 nucleotides, 50 to 100 nucleotides, 50 to 125 nucleotides, or 100 to 125 nucleotides in length. In some embodiments, an encoded miR binding site or sequence region is at least about 7 to about 28 nucleotides in length, e.g., at least about 8-28 nucleotides, 7-28 nucleotides, 8-18 nucleotides, 12-28 nucleotides, 20-26 nucleotides, 22 nucleotides, 24 nucleotides, or 26 nucleotides in length, and optionally comprises at least one consecutive region (e.g., 7 or 8 nucleotides) complementary (e.g., fully or partially complementary) to the seed sequence of a miRNA (e.g., a miR122, a miR142, a miR183, or a miR1).

[1831] In some embodiments, the encoded miR binding site is complementary (e.g., fully or partially complementary) to a miR expressed in liver or hepatocytes, such as miR122. In some embodiments, the encoded miR binding site or encoded miR binding site series comprises a miR122 binding site sequence. In some embodiments, the encoded miR122 binding site comprises the nucleotide sequence of ACAAACACCATTGTCACACTCCA (SEQ ID NO: 3672), or a nucleotide sequence having at least 50%, 55%, 60%, 65%, 70%, 75%, 80%, 85%, 90%, at least 95%, at least 99%, or 100% sequence identity, or having at least one, two, three, four, five, six, or seven modifications, e.g., substitutions (e.g., conservative substitutions), insertions, or deletions, but no more than ten modifications, e.g., substitutions (e.g., conservative substitutions), insertions, or deletions, to SEQ ID NO: 3672, e.g., wherein the modification can result in a mismatch between the encoded miR binding site and the corresponding miRNA. In some embodiments, the viral genome comprises at least 2, 3, 4, or 5 copies of the encoded miR122 binding site, e.g., an encoded miR122 binding site series, optionally wherein the encoded miR122 binding site series comprises the nucleotide sequence of: ACAAACACCATTGTCACACTCCACACAAACACCATTGTCACACTCCACACAAACACCATTGTCACACT CCA (SEQ ID NO: 3673), or a nucleotide sequence having at least 50%, 55%, 60%, 65%, 70%, 75%, 80%, 85%, 90%, at least 95%, at least 99%, or 100% sequence identity, or having at least one, two, three, four, five, six, or seven modifications, e.g., substitutions (e.g., conservative substitutions), insertions, or deletions, but no more than ten modifications, e.g., substitutions (e.g., conservative substitutions), insertions, or deletions, to SEQ ID NO: 3673, e.g., wherein the modification can result in a mismatch between the encoded miR binding site and the corresponding miRNA. In some embodiments, at least two of the encoded miR122 binding sites are connected directly, e.g., without a spacer. In other embodiments, at least two of the encoded miR122 binding sites are separated by a spacer, e.g., 1, 2, 3, 4, 5, 6, 7, 8, 9, or 10 nucleotides in length, which is located between two or more consecutive encoded miR122 binding site sequences. In embodiments, the spacer is about 1 to 6 nucleotides or about 5 to 10 nucleotides, e.g., about 7-8, in length. In some embodiments, the spacer coding sequence or reverse complement thereof comprises one or more of (i) GGAT; (ii) CACGTG; (iii) GCATGC, or a repeat of one or more of (i)-(iii). In some embodiments, an encoded miR binding site series comprises at least 3-5 copies (e.g., 4 copies) of a miR122 binding site, with or without a spacer, wherein the spacer is about 1 to 6 nucleotides or about 5 to 10 nucleotides, e.g., about 7-8 nucleotides or about 8 nucleotides, in length. In some embodiments, the spacer comprises the nucleotide sequence of GATAGTTA, or a nucleotide sequence having at least one, two, or three modifications, e.g., substitutions (e.g., conservative substitutions), insertions, or deletions, but no more than four modifications, e.g., substitutions (e.g., conservative substitutions), insertions, or deletions, of GATAGTTA.

[1832] In some embodiments, the encoded miR binding site is complementary (e.g., fully or partially complementary) to a miR expressed in the heart. In embodiments, the encoded miR binding site or encoded miR binding site series comprises a miR-1 binding site. In some embodiments, the encoded miR-1 binding site comprises the nucleotide sequence of ATACATACTTCTTTACATTCCA (SEQ ID NO: 4679), a nucleotide sequence having at least 50%, 55%, 60%, 65%, 70%, 75%, 80%, 85%, 90%, at least 95%, at least 99%, or 100% sequence identity, or having at least one, two, three, four, five, six, or seven modifications e.g., substitutions (e.g., conservative substitutions), insertions, or deletions, but no more than ten modifications, e.g., substitutions (e.g., conservative substitutions), insertions, or deletions, to SEQ ID NO: 4679, e.g., wherein the modification can result in a mismatch between the encoded miR binding site and the corresponding miRNA. In some embodiments, the viral genome comprises at least 2, 3, 4, or 5 copies of the encoded miR-1 binding site, e.g., an encoded miR-1 binding site series. In some embodiments, the at least 2, 3, 4, or 5 copies (e.g., 2 or 3 copies) of the encoded miR-1 binding site are continuous (e.g., not separated by a spacer) or separated by a spacer. In some embodiments, the spacer is about 1 to 6 nucleotides or about 5 to 10 nucleotides, e.g., about 7-8 nucleotides or about 8 nucleotides, in length. In some embodiments, the spacer sequence comprises one or more of (i) GGAT; (ii) CACGTG; (iii) GCATGC, or a repeat of one or more of (i)-(iii). In some embodiments, the spacer comprises the nucleotide sequence of GATAGTTA, or a nucleotide sequence having at least one, two, or three modifications, e.g., substitutions (e.g., conservative substitutions), insertions, or deletions, but no more than four modifications, e.g., substitutions (e.g., conservative substitutions), insertions, or deletions, of GATAGTTA.

[1833] In some embodiments, the encoded miR binding site is complementary (e.g., fully or partially complementary) to a miR expressed in hematopoietic lineage, including immune cells (e.g., antigen presenting cells or APC, including dendritic cells (DCs), macrophages, and B-lymphocytes). In some embodiments, the encoded miR binding site complementary to a miR expressed in hematopoietic lineage comprises a nucleotide sequence disclosed, e.g., in US 2018/0066279, the contents of which are incorporated by reference herein in its entirety.

[1834] In embodiments, the encoded miR binding site or encoded miR binding site series comprises a miR-142-3p binding site sequence. In some embodiments, the encoded miR-142-3p binding site comprises the nucleotide sequence of TCCATAAAGTAGGAAACACTACA (SEQ ID NO: 3674), a nucleotide sequence having at least 50%, 55%, 60%, 65%, 70%, 75%, 80%, 85%, 90%, at least 95%, at least 99%, or 100% sequence identity, or having at least one, two, three, four, five, six, or seven modifications e.g., substitutions (e.g., conservative substitutions), insertions, or deletions, but no more than ten modifications, e.g., substitutions (e.g., conservative substitutions), insertions, or deletions, to SEQ ID NO: 3674, e.g., wherein the modification can result in a mismatch between the encoded miR binding site and the corresponding miRNA. In some embodiments, the viral genome comprises at least 2, 3, 4, or 5 copies of the encoded miR-142-3p binding site, e.g., an encoded miR-142-3p binding site series. In some embodiments, the at least 2, 3, 4, or 5 copies (e.g., 2 or 3 copies) of the encoded miR-142-3p binding site are continuous (e.g., not separated by a spacer) or separated by a spacer. In some embodiments, the spacer is about 1 to 6 nucleotides or about 5 to 10 nucleotides, e.g., about 7-8 nucleotides or about 8 nucleotides, in length. In some embodiments, the spacer sequence comprises one or more of (i) GGAT; (ii) CACGTG; (iii) GCATGC, or a repeat of one or more of (i)-(iii). In some embodiments, the spacer comprises the nucleotide sequence of GATAGTTA, or a nucleotide sequence having at least one, two, or three modifications, e.g., substitutions (e.g., conservative substitutions), insertions, or deletions, but no more than four modifications, e.g., substitutions (e.g., conservative substitutions), insertions, or deletions, of GATAGTTA.

[1835] In some embodiments, the encoded miR binding site is complementary (e.g., fully complementary or partially complementary) to a miR expressed in a DRG (dorsal root ganglion) neuron, e.g., a miR183, a miR182, and/or miR96 binding site. In some embodiments, the encoded miR binding site is complementary to a miR expressed in expressed in a DRG neuron comprises a nucleotide sequence disclosed, e.g., in WO2020/132455, the contents of which are incorporated by reference herein in its entirety.

[1836] In some embodiments, the encoded miR binding site or encoded miR binding site series comprises a miR183 binding site sequence. In some embodiments, the encoded miR183 binding site comprises the nucleotide sequence of AGTGAATTCTACCAGTGCCATA (SEQ ID NO: 3675), or a nucleotide sequence having at least 50%, 55%, 60%, 65%, 70%, 75%, 80%, 85%, 90%, at least 95%, at least 99%, or 100% sequence identity, or having at least one, two, three, four, five, six, or seven modifications, e.g., substitutions (e.g., conservative substitutions), insertions, or deletions, but no more than ten modifications, e.g., substitutions (e.g., conservative substitutions), insertions, or deletions, to SEQ ID NO: 3675, e.g., wherein the modification can result in a mismatch between the encoded miR binding site and the corresponding miRNA. In some embodiments, the sequence complementary to the seed sequence corresponds to the double underlined of the encoded miR-183 binding site sequence. In some embodiments, the viral genome comprises at least comprises at least 2, 3, 4, or 5 copies (e.g., at least 2 or 3 copies) of the encoded miR183 binding site, e.g., an encoded miR183 binding site. In some embodiments, the at least 2, 3, 4, or 5 copies (e.g., 2 or 3 copies) of the encoded miR183 binding site are continuous (e.g., not separated by a spacer) or separated by a spacer. In some embodiments, the spacer is about 1 to 6 nucleotides or about 5 to 10 nucleotides, e.g., about 7-8 nucleotides or about 8 nucleotides, in length. In some embodiments, the spacer comprises the nucleotide sequence of GATAGTTA, or a nucleotide sequence having at least one, two, or three modifications, e.g., substitutions (e.g., conservative substitutions), insertions, or deletions, but no more than four modifications, e.g., substitutions (e.g., conservative substitutions), insertions, or deletions, of GATAGTTA. In some embodiments, the spacer sequence comprises one or more of (i) GGAT; (ii) CACGTG; (iii) GCATGC, or a repeat of one or more of (i)-(iii).

[1837] In some embodiments, the encoded miR binding site or the encoded miR binding site series comprises a miR182 binding site sequence. In some embodiments, the encoded miR182 binding site comprises, the nucleotide sequence of AGTGTGAGTTCTACCATTGCCAAA (SEQ ID NO: 3676), a sequence having at least 50%, 55%, 60%, 65%, 70%, 75%, 80%, 85%, 90%, at least 95%, at least 99%, or 100% sequence identity, or having at least one, two, three, four, five, six, or seven modifications, e.g., substitutions (e.g., conservative substitutions), insertions, or deletions, but no more than ten modifications, e.g., substitutions (e.g., conservative substitutions), insertions, or deletions, to SEQ ID NO: 3676, e.g., wherein the modification can result in a mismatch between the encoded miR binding site and the corresponding miRNA. In some embodiments, the viral genome comprises at least 2, 3, 4, or 5 copies of the encoded miR182 binding site, e.g., an encoded miR182 binding site series. In some embodiments, the at least 2, 3, 4, or 5 copies (e.g., 2 or 3 copies) of the encoded miR182 binding site are continuous (e.g., not separated by a spacer) or separated by a spacer. In some embodiments, the spacer is about 1 to 6 nucleotides or about 5 to 10 nucleotides, e.g., about 7-8 nucleotides or about 8 nucleotides, in length. In some embodiments, the spacer comprises the nucleotide sequence of GATAGTTA, or a nucleotide sequence having at least one, two, or three modifications, e.g., substitutions (e.g., conservative substitutions), insertions, or deletions, but no more than four modifications, e.g., substitutions (e.g., conservative substitutions), insertions, or deletions, of GATAGTTA. In some embodiments, the spacer sequence comprises one or more of (i) GGAT; (ii) CACGTG; (iii) GCATGC, or a repeat of one or more of (i)-(iii).

[1838] In certain embodiments, the encoded miR binding site or the encoded miR binding site series comprises a miR96 binding site sequence. In some embodiments, the encoded miR96 binding site comprises the nucleotide sequence of AGCAAAAATGTGCTAGTGCCAAA (SEQ ID NO: 3677), a sequence having at least 50%, 55%, 60%, 65%, 70%, 75%, 80%, 85%, 90%, at least 95%, at least 99%, or 100% sequence identity, or having at least one, two, three, four, five, six, or seven modifications, e.g., substitutions (e.g., conservative substitutions), insertions, or deletions, but no more than ten modifications, e.g., substitutions (e.g., conservative substitutions), insertions, or deletions, to SEQ ID NO: 3677, e.g., wherein the modification can result in a mismatch between the encoded miR binding site and the corresponding miRNA. In some embodiments, the viral genome comprises at least 2, 3, 4, or 5 copies of the encoded miR96 binding site, e.g., an encoded miR96 binding site series. In some embodiments, the at least 2, 3, 4, or 5 copies (e.g., 2 or 3 copies) of the encoded miR96 binding site are continuous (e.g., not separated by a spacer) or separated by a spacer. In some embodiments, the spacer is about 1 to 6 nucleotides or about 5 to 10 nucleotides, e.g., about 7-8 nucleotides or about 8 nucleotides, in length. In some embodiments, the spacer comprises the nucleotide sequence of GATAGTTA, or a nucleotide sequence having at least one, two, or three modifications, e.g., substitutions (e.g., conservative substitutions), insertions, or deletions, but no more than four modifications, e.g., substitutions (e.g., conservative substitutions), insertions, or deletions, of GATAGTTA. In some embodiments, the spacer sequence comprises one or more of (i) GGAT; (ii) CACGTG; (iii) GCATGC, or a repeat of one or more of (i)-(iii).

[1839] In some embodiments, the encoded miR binding site series comprises a miR122 binding site, a miR-1, a miR142 binding site, a miR183 binding site, a miR182 binding site, a miR 96 binding site, or a combination thereof. In some embodiments, the encoded miR binding site series comprises at least 2, 3, 4, or 5 copies of a miR122 binding site, a miR142 binding site, a miR183 binding site, a miR182 binding site, a miR 96 binding site, or a combination thereof. In some embodiments, at least two of the encoded miR binding sites are connected directly, e.g., without a spacer. In other embodiments, at least two of the encoded miR binding sites are separated by a spacer, e.g., 1, 2, 3, 4, 5, 6, 7, 8, 9, or 10 nucleotides in length, which is located between two or more consecutive encoded miR binding site sequences. In embodiments, the spacer is at least about 5 to 10 nucleotides, e.g., about 7-8 nucleotides or about 8 nucleotides, in length. In some embodiments, the spacer coding sequence or reverse complement thereof comprises one or more of (i) GGAT; (ii) CACGTG; (iii) GCATGC, or a repeat of one or more of (i)-(iii). In some embodiments, the spacer comprises the nucleotide sequence of GATAGTTA, or a nucleotide sequence having at least one, two, or three modifications, e.g., substitutions (e.g., conservative substitutions), insertions, or deletions, but no more than four modifications, e.g., substitutions (e.g., conservative substitutions), insertions, or deletions, of GATAGTTA.

[1840] In some embodiments, an encoded miR binding site series comprises at least 2-5 copies (e.g., 2 or 3 copies) of a combination of at least two, three, four, five, or all of a miR-1, miR122 binding site, a miR142 binding site, a miR183 binding site, a miR182 binding site, a miR96 binding site, wherein each of the miR binding sites within the series are continuous (e.g., not separated by a spacer) or are separated by a spacer. In some embodiments, the spacer is about 1 to 6 nucleotides or about 5 to 10 nucleotides, e.g., about 7-8 nucleotides or about 8 nucleotides, in length. In some embodiments, the spacer sequence comprises one or more of (i) GGAT; (ii) CACGTG; (iii) GCATGC, or a repeat of one or more of (i)-(iii). In some embodiments, the spacer comprises the nucleotide sequence of GATAGTTA, or a nucleotide sequence having at least one, two, or three modifications, e.g., substitutions (e.g., conservative substitutions), insertions, or deletions, but no more than four modifications, e.g., substitutions (e.g., conservative substitutions), insertions, or deletions, of GATAGTTA.

[1841] In some embodiments, an encoded miR binding site series comprises at least 2-5 copies (e.g., 2 or 3 copies) of a combination of a miR-122 binding site and a miR-1 binding site, wherein each of the miR binding sites within the series are continuous (e.g., not separated by a spacer) or are separated by a spacer. In some embodiments, the spacer is about 1 to 6 nucleotides or about 5 to 10 nucleotides, e.g., about 7-8 nucleotides or about 8 nucleotides, in length. In some embodiments, the spacer sequence comprises one or more of (i) GGAT; (ii) CACGTG; (iii) GCATGC, or a repeat of one or more of (i)-(iii). In some embodiments, the spacer comprises the nucleotide sequence of GATAGTTA, or a nucleotide sequence having at least one, two, or three modifications, e.g., substitutions (e.g., conservative substitutions), insertions, or deletions, but no more than four modifications, e.g., substitutions (e.g., conservative substitutions), insertions, or deletions, of GATAGTTA.

### Genome Size

[1842] In one embodiment, the AAV particle described herein (e.g., an AAV particle comprising an AAV capsid polypeptide, e.g., an AAV capsid variant), may comprise a single-stranded or double-stranded viral genome. The size of the viral genome may be small, medium, large or the maximum size. As described above, the viral genome may comprise a promoter and a polyA tail.

[1843] In one embodiment, the viral genome may be a small single stranded viral genome. A small single stranded viral genome may be 2.1 to 3.5 kb in size such as, but not limited to, about 2.1, 2.2, 2.3, 2.4, 2.5, 2.6, 2.7, 2.8, 2.9, 3.0, 3.1, 3.2, 3.3, 3.4, and 3.5 kb in size.

[1844] In one embodiment, the viral genome may be a small double stranded viral genome. A small double stranded viral genome may be 1.3 to 1.7 kb in size such as, but not limited to, about 1.3, 1.4, 1.5, 1.6, and 1.7 kb in size.

[1845] In one embodiment, the viral genome may be a medium single stranded viral genome. A medium single stranded viral genome may be 3.6 to 4.3 kb in size such as, but not limited to, about 3.6, 3.7, 3.8, 3.9, 4.0, 4.1, 4.2 and 4.3 kb in size.

[1846] In one embodiment, the viral genome may be a medium double stranded viral genome. A medium double stranded viral genome may be 1.8 to 2.1 kb in size such as, but not limited to, about 1.8, 1.9, 2.0, and 2.1 kb in size.

[1847] In one embodiment, the viral genome may be a large single stranded viral genome. A large single stranded viral genome may be 4.4 to 6.0 kb in size such as, but not limited to, about 4.4, 4.5, 4.6, 4.7, 4.8, 4.9, 5.0, 5.1, 5.2, 5.3, 5.4, 5.5, 5.6, 5.7, 5.8, 5.9 and 6.0 kb in size.

[1848] In one embodiment, the viral genome may be a large double stranded viral genome. A large double stranded viral genome may be 2.2 to 3.0 kb in size such as, but not limited to, about 2.2, 2.3, 2.4, 2.5, 2.6, 2.7, 2.8, 2.9 and 3.0 kb in size.

### Payloads

[1849] In some embodiments, an AAV particle of the present disclosure (e.g. an AAV particle comprising an AAV capsid polypeptide, e.g., an AAV capsid variant) comprises a viral genome comprising a nucleic acid encoding a payload. In some embodiments, the encoded payload is an RNAi agent or a polypeptide. A payload of the present disclosure may be, but is not limited to, a peptide, a polypeptide, a protein, an antibody, an RNAi agent, etc.

[1850] In some embodiments, the nucleotide sequence encoding a payload may comprise a combination of coding and non-coding nucleic acid sequences. In some embodiments, the nucleotide sequence encoding the payload may encode a coding or non-coding RNA.

[1851] In some embodiments, the AAV particles described herein, e.g., an AAV particle comprising an AAV capsid polypeptide, e.g., an AAV capsid variant, comprises a nucleic acid encoding a payload. In some embodiments, the encoded payload comprises a therapeutic protein, an antibody, an enzyme, one or more components of a genome editing system, and/or an RNAi agent (e.g., a dsRNA, siRNA, shRNA, pre-miRNA, pri-miRNA, miRNA, stRNA, lncRNA, piRNA, or snoRNA). In some embodiments, the encoded payload modulates, e.g., increases or decreases, the presence, level, and/or activity of a gene, mRNA, protein, or a combination thereof, e.g., in a cell or a tissue.

### Polypeptides

[1852] In some embodiments, the encoded payload of AAV particle comprising an AAV capsid polypeptide, e.g., an AAV capsid variant, described herein comprises a polypeptide, protein, or peptide, e.g., a polypeptide, protein, or peptide described herein. The nucleic acid encoding the payload, may encode a product of any known gene and/or a recombinant version thereof. In some embodiments, the nucleic acid encoding the payload may encode at least one allele of apolipoprotein E (APOE) such as, but not limited to ApoE2, ApoE3 and/or ApoE4. In one embodiment, the nucleic acid encoding the payload encodes ApoE2 (cys112, cys158) protein or a fragment or variant thereof. In one embodiment, the nucleic acid encoding the payload encodes an ApoE3 (cys112, arg158) protein or fragment or variant thereof. In one embodiment, the nucleic acid encoding the payload encodes ApoE4 (arg112, arg158). As another non-limiting example, the encoded payload comprises an aromatic L-amin acid decarboxylase (AADC) protein. As another non-limiting example, the encoded payload comprises an antibody, or a fragment thereof. As another non-limiting example, the encoded payload comprises a human survival of motor neuron (SMN) 1 or SMN2 protein, or fragments or variants thereof. As another non-limiting example, the encoded payload region comprises a glucocerebrosidase (GBA1) protein, or a fragment or variant thereof. As another non-limiting example, the encoded payload comprises a granulin precursor or progranulin (GRN) protein, or a fragment or variant thereof. As another non-limiting example, the encoded payload comprises an aspartoacylase (ASPA) protein, or a fragment or variant thereof. As another non-limiting example, the encoded payload comprises a tripeptidyl peptidase I (CLN2) protein, or a fragment or variant thereof. As another non-limiting example, the encoded payload comprises a beta-galactosidase (GLB1) protein, or a fragment or variant thereof. As another non-limiting example, the encoded payload comprises a N-sulphoglucosamine sulphohydrolase (SGSH) protein, or a fragment or variant thereof. As another non-limiting example, the encoded payload comprises an N-acetyl-alpha-glucosaminidase (NAGLU) protein, or a fragment or variant thereof. As another non-limiting example, the encoded payload comprises an iduronate 2-sulfatase (IDS) protein, or a fragment or variant thereof. As another non-limiting example, the encoded payload comprises an intracellular cholesterol transporter (NPC1) protein, or a fragment or variant thereof. As another non-limiting example, the encoded payload comprises a gigaxonin (GAN) protein, or a fragment or variant thereof. The AAV viral genomes encoding polypeptides described herein may be useful in the fields of human disease, viruses, infections veterinary applications and a variety of in vivo and in vitro settings.

[1853] Amino acid sequences of a payload polypeptide encoded by a viral genome described herein, may be translated as a whole polypeptide, a plurality of polypeptides or fragments of polypeptides, which independently may be encoded by one or more nucleic acids, fragments of nucleic acids or variants of any of the aforementioned.

### Antibodies and Antibody Binding Fragments

[1854] In some embodiments, the encoded payload of AAV particle comprising an AAV capsid variant described herein comprises an antibody or antibody binding fragment. In some embodiments, the antibody may be a full antibody, a fragment, or any functional variant thereof. As non-limiting examples, an antibody may be a native antibody (e.g., with two heavy and two light chains), a heavy chain variable region, a light chain variable region, a heavy chain constant region, a light chain constant region, Fab, Fab′, F(ab′)₂, Fv, or scFv fragments, a diabody, a linear antibody, a single-chain antibody, a multi-specific antibody, an intrabody, one or more heavy chain complementarity determining regions (CDR), one or more light chain CDRs, a bi-specific antibody, a monoclonal antibody, a polyclonal antibody, a humanized antibody, an antibody mimetic, an antibody variant, a miniaturized antibody, a unibody, a maxibody, and/or a chimeric antigen receptor. The encoded antibody or antibody binding fragment may be useful in the treatment of a neurological disease, a neurodegenerative disorder, a muscular disease, a neuromuscular disorder, a neuro-oncological disorder, or any disorder associated with the central and/or peripheral nervous systems.

[1855] In some embodiments, the viral genome of the AAV particle (e.g., an AAV particle comprising an AAV capsid variant described herein) may comprise a nucleic acid which has been engineered to enable or enhance the expression of an antibody, or antibody binding fragment thereof.

[1856] In some embodiments, the encoded antibody of the payload of an AAV particle comprising an AAV capsid variant, described herein comprises at least one immunoglobulin variable domain sequence. An antibody may include, for example, full-length, mature antibodies and antigen-binding fragments of an antibody. For example, an antibody can include a heavy (H) chain variable domain sequence (VH), and a light (L) chain variable domain sequence (VL). In another example, an antibody includes two heavy (H) chain variable domain sequences and two light (L) chain variable domain sequence, thereby forming two antigen binding sites, such as Fab, Fab′, F(ab′)2, Fc, Fd, Fd′, Fv, single chain antibodies (scFv for example), single variable domain antibodies, diabodies (Dab) (bivalent and bispecific), and chimeric (e.g., humanized) antibodies, which may be produced by the modification of whole antibodies or those synthesized de novo using recombinant DNA technologies. These functional antibody fragments, e.g., an antibody binding fragments, retain the ability to selectively bind with their respective antigen or receptor.

[1857] In some embodiments, the antibody binding fragment comprises at least one portion of an intact antibody, or recombinant variants thereof, and refers to the antigen binding domain, for example, an antigenic determining variable region of an intact antibody, that is sufficient to confer recognition and specific binding of the antibody fragment to a target, such as an antigen. Examples of antigen binding fragments include: (i) a Fab fragment, a monovalent fragment consisting of the VL, VH, CL and CH1 domains; (ii) a F(ab′)2 fragment, a bivalent fragment comprising two Fab fragments linked by a disulfide bridge at the hinge region; (iii) a Fd fragment consisting of the VH and CH1 domains; (iv) a Fv fragment consisting of the VL and VH domains of a single arm of an antibody, (v) a diabody (dAb) fragment, which consists of a VH domain; (vi) a camelid or camelized variable domain; (vii) a single chain Fv (scFv), see e.g., Bird et al. (1988) Science 242:423-426; and Huston et al. (1988) Proc. Natl. Acad. Sci. USA 85:5879-5883); and (viii) a single domain antibody. These antibody fragments are obtained using conventional techniques known to those with skill in the art, and the fragments are screened for utility in the same manner as are intact antibodies. An antibody fragment can also be incorporated into single domain antibodies, maxibodies, minibodies, nanobodies, intrabodies, diabodies, triabodies, tetrabodies, v-NAR and bis-scFv (see, for example, Hollinger and Hudson, Nature Biotechnology 23:1126-1136, 2005).

[1858] In some embodiments, the encoded antibody of the payload of an AAV particle described herein comprises a multispecific antibody, e.g., it comprises a plurality of immunoglobulin variable domains sequences, wherein a first immunoglobulin variable domain sequence of the plurality has binding specificity for a first epitope and a second immunoglobulin variable domain sequence of the plurality has binding specificity for a second epitope. In some embodiments, the first and second epitopes are on the same antigen, e.g., the same protein (or subunit of a multimeric protein). In some embodiments, the first and second epitopes overlap. In some embodiments, the first and second epitopes do not overlap. In some embodiments, the first and second epitopes are on different antigens, e.g., the different proteins (or different subunits of a multimeric protein). In some embodiments, a multispecific antibody comprises a third, fourth or fifth immunoglobulin variable domain. In some embodiments, a multispecific antibody is a bispecific antibody, a trispecific antibody, or tetraspecific antibody.

[1859] In some embodiments, an encoded multispecific antibody of the payload of an AAV particle described herein is an encoded bispecific antibody. A bispecific antibody has specificity for no more than two antigens. A bispecific antibody is characterized by a first immunoglobulin variable domain sequence which has binding specificity for a first epitope and a second immunoglobulin variable domain sequence that has binding specificity for a second epitope. In some embodiments, the first and second epitopes are on the same antigen, e.g., the same protein (or subunit of a multimeric protein). In some embodiments, the first and second epitopes overlap. In some embodiments, the first and second epitopes do not overlap. In some embodiments, the first and second epitopes are on different antigens, e.g., the different proteins (or different subunits of a multimeric protein).

[1860] An antibody or an antibody binding fragment encoded by a viral genome of an AAV particle described herein, may be, but is not limited to, an antibody or antibody fragment that binds to β-amyloid, APOE, tau, SOD1, TDP-43, huntingtin, and/or synuclein. In some embodiments, the encoded payload comprises an antibody or antibody fragment that binds to a neuro-oncology related target, e.g., HER2, EGFR (e.g., EGFRvIII). In some embodiments, the encoded payload comprises an antibody that binds to HER2/neu. In some embodiments, the encoded payload comprises an antibody that binds to β-amyloid. In some embodiments, the encoded payload comprises an antibody that binds to tau.

### Gene Editing System

[1861] In some embodiments, the encoded payload of AAV particle comprising an AAV capsid variant described herein comprises a gene editing system or one or more components thereof. In some embodiments, the gene editing system comprises nucleic acid sequences that encode proteins having enzymatic activity to (i) selectively induce double or single stranded breaks in a DNA or RNA sequence, or (ii) substitute, insert or delete a particular base or set of bases of a DNA or RNA sequence in the absence of a double or single stranded break in the DNA or RNA. In some embodiments, the gene editing system includes, but is not limited to a CRISPR-Cas system (including different Cas or Cas-related nucleases), a Zinc finger nuclease, a meganuclease, a TALEN or a base editors. In some embodiments, the gene editing system comprises a chromosomal integration of a transgene, e.g., introduced by a parvovirus vector in the absence of an exogenous nuclease or an enzymatic entity.

### RNAi Agents

[1862] In some embodiments, the encoded payload of AAV particle comprising an AAV capsid variant described herein comprises an RNAi agent, e.g., an RNAi agent described herein. In some embodiments, the encoded payload of a viral genome of an AAV particle comprising an AAV capsid variant described herein comprises an RNAi agent, the RNAi, such as but not limited to, a dsRNA, a siRNA, a shRNA, a pre-miRNA, a pri-miRNA, a miRNA, a stRNA, a lncRNA, a piRNA, or a snoRNA. In some embodiments, the encoded payload comprises an RNAi agent for inhibiting expression of a SOD1, MAPT, APOE, HTT, C9ORF72, TDP-43, APP, BACE, SNCA, ATXN1, ATXN3, ATXN7, SCN1A-SCN5A, or SCN8A-SCN11A gene, protein, and/or mRNA. In some embodiments, the RNAi agent encoded by a viral genome described herein inhibits SOD1, MAPT, APOE, HTT, C9ORF72, TDP-43, APP, BACE, SNCA, ATXN1, ATXN3, ATXN7, SCN1A-SCN5A, or SCN8A-SCN11A.

[1863] An AAV particle comprising an AAV capsid variant described herein may comprise a viral genome encoding an RNAi agent, which targets the mRNA of a gene to modulate, e.g., interfere with gene expression and/or protein production.

[1864] In some embodiments, the RNAi agent may target a gene at the location of a single-nucleotide polymorphism (SNP) or variant within the nucleotide sequence of the gene.

[1865] The RNAi agent may be an siRNA duplex, wherein the siRNA duplex contains an antisense strand (guide strand) and a sense strand (passenger strand) hybridized together forming a duplex structure, wherein the antisense strand is complementary to the nucleic acid sequence of the targeted gene, and wherein the sense strand is homologous to the nucleic acid sequence of the targeted gene. In some aspects, the 5′end of the antisense strand has a 5′ phosphate group and the 3′end of the sense strand contains a 3′hydroxyl group. In other aspects, there are none, one or 2 nucleotide overhangs at the 3′end of each strand.

[1866] Each strand of an siRNA duplex targeting a gene of interest may be about 19 to 25, 19 to 24 or 19 to 21 nucleotides in length, preferably about 19 nucleotides, 20 nucleotides, 21 nucleotides, 22 nucleotides, 23 nucleotides, 24 nucleotides, or 25 nucleotides in length.

[1867] In one embodiment, an siRNA or dsRNA includes at least two sequences that are complementary to each other. The dsRNA includes a sense strand having a first sequence and an antisense strand having a second sequence. The antisense strand includes a nucleotide sequence that is substantially complementary to at least part of an mRNA encoding the target gene, and the region of complementarity is 30 nucleotides or less, and at least 15 nucleotides in length. Generally, the dsRNA is 19 to 25, 19 to 24 or 19 to 21 nucleotides in length. In some embodiments, the dsRNA is from about 15 to about 25 nucleotides in length, and in other embodiments the dsRNA is from about 25 to about 30 nucleotides in length. In some embodiments, the dsRNA is about 15 nucleotides in length, 16 nucleotides in length, 17 nucleotides in length, 18 nucleotides in length, 19 nucleotides, 20 nucleotides, 21 nucleotides, 22 nucleotides, 23 nucleotides, 24 nucleotides, 25 nucleotides in length, 26 nucleotides in length, 27 nucleotides in length, 28 nucleotides in length, 29 nucleotides in length, or 30 nucleotides in length.

[1868] In some embodiments, the encoded RNAi agent is an siRNA.

[1869] In some embodiments, the RNAi agent, e.g., an RNAi agent described herein inhibits the expression of the gene, mRNA, and/or protein by at least 10%, at least 20%, at least 25%, at least 30%, at least 35% or at least 40% or more, such as when assayed by a method known in the art. In some embodiments, the RNAi agent inhibits expression of a gene, mRNA, and protein by 50-100%, e.g., by 30%, 40%, 50%, 60%, 70%, 80%, 85%, 90%, 95% and 100%.

[1870] In some embodiments, the AAV particle described herein, comprising a viral genome encoding an RNAi agent targeting a gene of interest is administered to a subject in need for treating and/or ameliorating a disease, e.g., a neurological disorder of any disease associated with the central or peripheral nervous systems.

Design of siRNA

[1871] An AAV particle described herein (e.g., an AAV particle comprising an AAV capsid variant described herein) may comprise a viral genome encoding a siRNA molecule (e.g., siRNA duplex or encoded dsRNA) that target a gene of interest and suppress target gene expression, mRNA expression, and protein production. In some aspects, the siRNA molecules are designed and used to knock out target gene variants in cells, e.g., transcripts that are identified in neurological disease. In some aspects, the siRNA molecules are designed and used to knock down target gene variants in cells.

[1872] Some guidelines for designing siRNAs (for insertion into a viral genome of the AAV particles described herein) have been proposed in the art. These guidelines generally recommend generating a 19-nucleotide duplexed region, symmetric 2-3 nucleotide 3′ overhangs, 5-phosphate and 3-hydroxyl groups targeting a region in the gene to be silenced. Other rules that may govern siRNA sequence preference include, but are not limited to, (i) A/U at the 5′ end of the antisense strand; (ii) G/C at the 5′ end of the sense strand; (iii) at least five A/U residues in the 5′ terminal one-third of the antisense strand; and (iv) the absence of any GC stretch of more than 9 nucleotides in length. In accordance with such considerations, together with the specific sequence of a target gene, highly effective siRNA molecules essential for suppressing mammalian target gene expression may be readily designed.

[1873] In one embodiment, the sense and/or antisense strand is designed based on the method and rules outlined in European Patent Publication No. EP1752536, the contents of which are herein incorporated by reference in their entirety. As a non-limiting example, the 3′-terminal base of the sequence is adenine, thymine or uracil. As a non-limiting example, the 5′-terminal base of the sequence is guanine or cytosine. As a non-limiting example, the 3′-terminal sequence comprises seven bases rich in one or more bases of adenine, thymine and uracil.

[1874] In one embodiment, an siRNA molecule comprises a sense strand and a complementary antisense strand in which both strands are hybridized together to form a duplex structure. The antisense strand has sufficient complementarity to the target mRNA sequence to direct target-specific RNAi, e.g., the siRNA molecule has a sequence sufficient to trigger the destruction of the target mRNA by the RNAi machinery or process.

[1875] In some embodiments, the antisense strand and target mRNA sequences have 100% complementarity. The antisense strand may be complementary to any part of the target mRNA sequence. Neither the identity of the sense sequence nor the homology of the antisense sequence need be 100% complementary to the target.

[1876] In other embodiments, the antisense strand and target mRNA sequences comprise at least one mismatch. As a non-limiting example, the antisense strand and the target mRNA sequence have at least 50-90%, 50-95%, 50-99%, 60-70%, 60-80%, 60-90%, 60-95%, 60-99%, 70-80%, 70-90%, 70-95%, 70-99%, 80-90%, 80-95%, 80-99%, 90-95%, 90-99% or 95-99% complementary.

[1877] The siRNA molecule may have a length from about 10-50 or more nucleotides, e.g., each strand comprising 10-50 nucleotides (or nucleotide analogs). Preferably, the siRNA molecule has a length from about 15-30, e.g., 15, 16, 17, 18, 19, 20, 21, 22, 23, 24, 25, 26, 27, 28, 29, or 30 nucleotides in each strand, wherein one of the strands is sufficiently complementary to a target region. In one embodiment, the siRNA molecule has a length from about 19 to 25, 19 to 24 or 19 to 21 nucleotides.

[1878] In some embodiments, the siRNA molecule can be a synthetic RNA duplex comprising about 19 nucleotides to about 25 nucleotides, and two overhanging nucleotides at the 3′-end.

[1879] The siRNA molecule may comprise an antisense sequence and a sense sequence, or a fragment or variant thereof. As a non-limiting example, the antisense sequence and the sense sequence have at least 50-90%, 50-95%, 50-99%, 60-70%, 60-80%, 60-90%, 60-95%, 60-99%, 70-80%, 70-90%, 70-95%, 70-99%, 80-90%, 80-95%, 80-99%, 90-95%, 90-99% or 95-99% complementary.

[1880] The sense and antisense sequences may be completely complementary across a substantial portion of their length. In other embodiments, the sense sequence and antisense sequence may be at least 70, 80, 90, 95 or 99% complementary across independently at least 50, 60, 70, 80, 85, 90, 95, or 99% of the length of the strands.

[1881] In some embodiments, the sense and antisense strands of a siRNA duplex are linked by a short spacer sequence leading to the expression of a stem-loop structure termed short hairpin RNA (shRNA). The hairpin is recognized and cleaved by Dicer, thus generating mature siRNA molecules.

[1882] In some embodiments, the siRNA molecules, as well as associated spacer and/or flanking regions once designed, can be encoded by the viral genome of the AAV particles described herein, for delivery to a cell.

### Molecular Scaffold

[1883] In some embodiments, the siRNA molecules may be encoded in a modulatory polynucleotide which also comprises a molecular scaffold.

[1884] In some embodiments, the modulatory polynucleotide which comprises the payload (e.g., siRNA, miRNA or other RNAi agent described herein) includes a molecular scaffold which comprises a 5′ flanking sequence, a loop region, and/or a 3′ flanking region. In some embodiments a 5′ or 3′ flanking region may be of any length and may a wild type microRNA sequence or a portion thereof, or may be completely artificial. A 3′ flanking sequence may mirror the 5′ flanking sequence in size and origin. Either flanking sequence may be absent. In one embodiment, both the 5′ and 3′ flanking sequences are absent. The 3′ flanking sequence may optionally contain one or more CNNC motifs, where “N” represents any nucleotide. In some embodiments, the loop comprises at least one UGUG motif. In some embodiments, the UGUG motif is located at the 5′ terminus of the loop. In some embodiments the 5′ and 3′ flanking sequences are the same sequence. In some embodiments they differ by 2%, 3%, 4%, 5%, 10%, 20% or more than 30% when aligned to each other.

[1885] In some embodiments, modulatory polynucleotide comprises a stem loop structure. In some embodiments, the modulatory polynucleotide comprises in 5′ to 3′ order: a 5′ flanking sequence, a guide strand sequence, a loop region, a passenger strand sequence, and a 3′ flanking sequence. In some embodiments, the modulatory polynucleotide comprises in 5′ to 3′ order: a 5′ flanking sequence, a passenger strand sequence, a loop region, a guide strand sequence, and a 3′ flanking sequence.

[1886] In one embodiment, the molecular scaffold comprises a dual-function targeting modulatory polynucleotide.

[1887] In one embodiment, the molecular scaffold may comprise one or more linkers known in the art. The linkers may separate regions or one molecular scaffold from another. As a non-limiting example, the molecular scaffold may be polycistronic.

[1888] In one embodiment, the modulatory polynucleotide is designed using at least one of the following properties: loop variant, seed mismatch/bulge/wobble variant, stem mismatch, loop variant and basal stem mismatch variant, seed mismatch and basal stem mismatch variant, stem mismatch and basal stem mismatch variant, seed wobble and basal stem wobble variant, or a stem sequence variant.

### AAV Production

[1889] Viral production disclosed herein describes processes and methods for producing AAV particles (with enhanced, improved and/or increased tropism for a target tissue), e.g., an AAV particle comprising an AAV capsid variant that may be used to contact a target cell to deliver a payload.

[1890] In some embodiments, disclosed herein is a method of making AAV particle of the present disclosure, e.g., an AAV particle comprising an AAV capsid variant the method comprising: (i) providing a host cell comprising a viral genome described herein and (ii) incubating the host cell under conditions suitable to enclose the viral genome in an AAV capsid variant, e.g., an AAV capsid variant described herein (e.g., an AAV capsid variant listed in Tables 3, 4, or 5), thereby making the AAV particle. In some embodiments, the method comprises prior to step (i), introducing a first nucleic acid comprising the viral genome into a cell. In some embodiments, the host cell comprises a second nucleic acid encoding the AAV capsid variant. In some embodiments, the second nucleic acid is introduced into the host cell prior to, concurrently with, or after the first nucleic acid molecule. In some embodiments, the AAV particle described herein is an isolated AAV particle. In some embodiments, the AAV particle described herein is a recombinant AAV particle.

[1891] Any method known in the art may be used for the preparation of AAV particles. In some embodiments, AAV particles are produced in mammalian cells (e.g., HEK293). In another embodiment, AAV particles are produced in insect cells (e.g., Sf9).

[1892] Methods of making AAV particles are well known in the art and are described in e.g., U.S. Pat. Nos. 6,204,059, 5,756,283, 6,258,595, 6,261,551, 6,270,996, 6,281,010, 6,365,394, 6,475,769, 6,482,634, 6,485,966, 6,943,019, 6,953,690, 7,022,519, 7,238,526, 7,291,498 and 7,491,508, 5,064,764, 6,194,191, 6,566,118, 8,137,948; or International Publication Nos. WO1996039530, WO1998010088, WO1999014354, WO1999015685, WO1999047691, WO2000055342, WO2000075353 and WO2001023597; Methods In Molecular Biology, ed. Richard, Humana Press, NJ (1995); O'Reilly et al., Baculovirus Expression Vectors, A Laboratory Manual, Oxford Univ. Press (1994); Samulski et al., J. Vir. 63:3822-8 (1989); Kajigaya et al., Proc. Nat'l. Acad. Sci. USA 88: 4646-50 (1991); Ruffing et al., J. Vir. 66:6922-30 (1992); Kimbauer et al., Vir., 219:37-44 (1996); Zhao et al., Vir. 272:382-93 (2000); the contents of each of which are herein incorporated by reference in their entirety. In some embodiments, the AAV particles are made using the methods described in International Patent Publication WO2015191508, the contents of which are herein incorporated by reference in their entirety.

### Therapeutic Applications

[1893] The present disclosure provides a method for treating a disease, disorder and/or condition in a subject, including a human subject, comprising administering to the subject an AAV particle described herein, e.g., an AAV particle comprising an AAV capsid variant (e.g., an AAV capsid variant described herein), or administering to the subject any of the described compositions, including a pharmaceutical composition, described herein.

[1894] In some embodiments, the AAV particle of the present disclosure (e.g., an AAV particle comprising an AAV capsid variant) are administered to a subject prophylactically, to prevent on-set of disease. In another embodiment, the AAV particle (e.g., an AAV particle comprising an AAV capsid variant) of the present disclosure are administered to treat (e.g., lessen the effects of) a disease or symptoms thereof. In yet another embodiment, the AAV particle of the present disclosure (e.g., an AAV particle comprising an AAV capsid variant) are administered to cure (eliminate) a disease. In another embodiment, the AAV particle (e.g., an AAV particle comprising an AAV capsid variant) of the present disclosure are administered to prevent or slow progression of disease. In yet another embodiment, the AAV particle (e.g., an AAV particle comprising an AAV capsid variant) of the present disclosure are used to reverse the deleterious effects of a disease. Disease status and/or progression may be determined or monitored by standard methods known in the art.

[1895] In some embodiments, the AAV particle of the disclosure (e.g., an AAV particle comprising an AAV capsid variant) is useful for treatment, prophylaxis, palliation or amelioration of a genetic disorder, e.g., an autosomal dominant genetic disorder, an autosomal recessive disorder, X-linked dominant genetic disorder, an X-linked recessive genetic disorder, or a Y-linked genetic disorder. In some embodiments, the genetic disorder is a monogenetic disorder or a polygenic disorder. In some embodiments, treatment of a genetic disorder, e.g., a monogenic disorder, comprises the use of an AAV particle described herein (e.g., an AAV particle comprising an AAV capsid variant described herein) for a gene replacement therapy.

[1896] In some embodiments, provided herein is method for treating a neurological disorder and/or neurodegenerative disorder in a subject, comprising administering to the subject an effective amount of a pharmaceutical composition described herein or an AAV particle, e.g., a plurality of particles, comprising an AAV capsid variant described herein. In some embodiments, treatment of a neurological disorder and/or neurodegenerative disorder comprises prevention of said neurological disorder and/or neurological disorder.

[1897] In some embodiments, the AAV particle (e.g., an AAV particle comprising an AAV capsid variant) of the disclosure is useful for the treatment, prophylaxis, palliation or amelioration of neurological diseases and/or disorders. In some embodiments, the AAV particle of the disclosure (e.g., an AAV particle comprising an AAV capsid variant) is useful for the treatment, prophylaxis, palliation or amelioration of tauopathy.

[1898] In some embodiments, the AAV particle of the disclosure (e.g., an AAV particle comprising an AAV capsid variant) is for the treatment, prophylaxis, palliation or amelioration of Alzheimer's Disease. In some embodiments, treatment of Alzheimer's Disease comprises the use of an AAV particle described herein (e.g., an AAV particle comprising an AAV capsid variant described herein) for a gene replacement therapy. In some embodiments, the payload encoded by an AAV particle comprising a capsid variant described herein comprises an ApoE2 protein, ApoE4 protein, an ApoE3 protein, BDNF protein, CYP46A1 protein, Klotho protein, fractalkine (FKN) protein, neprilysin protein (NEP), CD74 protein, caveolin-1, or a combination or variant thereof. In some embodiments, treatment of Alzheimer's Disease comprises the use of an AAV particle described herein (e.g., an AAV particle comprising an AAV capsid variant described herein) for a reduction in the expression of a tau gene and/or protein, a synuclein gene and/or protein, or a combination or variant thereof. In some embodiments, the payload encoded by an AAV particle comprising a capsid variant described herein comprises an antibody that binds to tau or synuclein, an RNAi agent for inhibiting tau or synuclein, a gene editing system (e.g., a CRISPR-Cas system) for altering tau or synuclein expression, or a combination thereof.

[1899] In some embodiments, the AAV particle of the disclosure (e.g., an AAV particle comprising an AAV capsid variant) is for the treatment, prophylaxis, palliation or amelioration of frontal temporal dementia. In some embodiments, treatment of frontal temporal dementia comprises the use of an AAV particle described herein (e.g., an AAV particle comprising an AAV capsid variant described herein) for a gene replacement therapy. In some embodiments, the payload encoded by an AAV particle comprising a capsid variant described herein comprises a progranulin protein or variant thereof.

[1900] In some embodiments, the AAV particle of the disclosure (e.g., an AAV particle comprising an AAV capsid variant) is useful the treatment, prophylaxis, palliation or amelioration of Friedreich's ataxia, or any disease stemming from a loss or partial loss of frataxin protein. In some embodiments, treatment of Friedreich's ataxia comprises the use of an AAV particle described herein (e.g., an AAV particle comprising an AAV capsid variant described herein) for a gene replacement therapy.

[1901] In some embodiments, the AAV particle of the disclosure (e.g., an AAV particle comprising an AAV capsid variant) is useful for the treatment, prophylaxis, palliation or amelioration of Parkinson's Disease. In some embodiments, treatment of Parkinson's disease comprises the use of an AAV particle described herein (e.g., an AAV particle comprising an AAV capsid variant described herein) for a gene replacement therapy. In some embodiments, the payload encoded by an AAV particle comprising a capsid variant described herein comprises an AADC protein, GAD protein, GDNF protein, TH-GCH1 protein, GBA protein, AIMP2-DX2 protein, or a combination or variant thereof. In some embodiments, treatment of Parkinson's disease comprises the use of an AAV particle described herein (e.g., an AAV particle comprising an AAV capsid variant described herein) for a gene knock-down therapy or a gene editing therapy (e.g., knock-out, repression, or correction). In some embodiments, the payload encoded by an AAV particle comprising a capsid variant described herein comprises a modulator, e.g., an RNAi agent or a CRISPR-Cas system, for altering expression of an alpha-synuclein gene, mRNA, and/or protein, or variant thereof.

[1902] In some embodiments, the AAV particle of the disclosure (e.g., an AAV particle comprising an AAV capsid variant) is useful for the treatment, prophylaxis, palliation or amelioration of an AADC deficiency. In some embodiments, treatment of AADC deficiency comprises the use of an AAV particle described herein (e.g., an AAV particle comprising an AAV capsid variant described herein) for a gene replacement therapy. In some embodiments, the payload encoded by an AAV particle comprising a capsid variant described herein comprises an AADC protein or variant thereof.

[1903] In some embodiments, the AAV particle of the disclosure (e.g., an AAV particle comprising an AAV capsid variant) is useful for the treatment, prophylaxis, palliation or amelioration of Amyotrophic lateral sclerosis (ALS). In some embodiments, treatment of ALS comprises the use of an AAV particle described herein (e.g., an AAV particle comprising an AAV capsid variant described herein) for a gene replacement therapy. In some embodiments, the payload encoded by an AAV particle comprising a capsid variant described herein comprises an TDP-43 protein, UPF1 protein, C9orf72 protein, CCNF protein, HSF1 protein, Factor H protein, NGF protein, ADAR2 protein, GDNF protein, VEGF protein, HGF protein, NRTN protein, AIMP2-DX2 protein, or a combination or variant thereof. In some embodiments, treatment of ALS comprises the use of an AAV particle described herein (e.g., an AAV particle comprising an AAV capsid variant described herein) for a gene knock-down therapy or a gene editing therapy (e.g., knock-out, repression, or correction). In some embodiments, the payload encoded by an AAV particle comprising a capsid variant described herein comprises a modulator, e.g., an RNAi agent or a CRISPR-Cas system, for altering expression of a SOD1 or C9ORF72 gene, mRNA, and/or protein, or a combination or variant thereof.

[1904] In some embodiments, the AAV particle of the disclosure (e.g., an AAV particle comprising an AAV capsid variant) is useful for the treatment, prophylaxis, palliation or amelioration of Huntington's Disease. In some embodiments, treatment of ALS comprises the use of an AAV particle described herein (e.g., an AAV particle comprising an AAV capsid variant described herein) for a gene knock-down (e.g., knock-out) therapy or a gene editing therapy (e.g., knock-out, repression, or correction). In some embodiments, the payload encoded by an AAV particle comprising a capsid variant described herein comprises a modulator, e.g., an RNAi agent or a CRISPR-Cas system, for altering expression of an HTT gene, mRNA, and/or protein, or a variant thereof.

[1905] In some embodiments, the AAV particle of the disclosure (e.g., an AAV particle comprising an AAV capsid variant) is useful for the treatment, prophylaxis, palliation or amelioration of spinal muscular atrophy. In some embodiments, treatment of spinal muscular atrophy comprises the use of an AAV particle described herein (e.g., an AAV particle comprising an AAV capsid variant described herein) for a gene replacement therapy. In some embodiments, the payload encoded by an AAV particle comprising a capsid variant described herein comprises an SMN1 protein, an SMN2 protein, or a combination or variant thereof.

[1906] In some embodiments, the AAV particle of the disclosure (e.g., an AAV particle comprising an AAV capsid variant) is useful for the treatment, prophylaxis, palliation or amelioration of multiple system atrophy. In some embodiments, treatment of multiple system atrophy comprises the use of an AAV particle described herein (e.g., an AAV particle comprising an AAV capsid variant described herein) for a gene replacement therapy.

[1907] In some embodiments, the AAV particle of the disclosure (e.g., an AAV particle comprising an AAV capsid variant) is useful for the treatment, prophylaxis, palliation or amelioration of Gaucher disease (GD) (e.g., Type 1 GD, Type 2 GD, or Type 3 GD). In some embodiments, the AAV particle of the disclosure (e.g., an AAV particle comprising an AAV capsid variant) is useful for the treatment, prophylaxis, palliation or amelioration of Parkinson's disease associated with a GBA mutation. In some embodiments, the AAV particle of the disclosure (e.g., an AAV particle comprising an AAV capsid variant) is useful for the treatment, prophylaxis, palliation or amelioration of dementia with Lewy Bodies (DLB).

[1908] In some embodiments, the AAV particle of the disclosure (e.g., an AAV particle comprising an AAV capsid variant) is useful for treatment, prophylaxis, palliation or amelioration of a leukodystrophy, e.g., Alexander disease, autosomal dominant leukodystrophy with autonomic diseases (ADLD), adrenoleukodystrophy (ALD), Canavan disease, cerebrotendinous xanthomatosis (CTX), metachromatic leukodystrophy (MLD), Pelizaeus-Merzbacher disease, or Refsum disease. In some embodiments, treatment of MLD comprises the use of an AAV particle described herein (e.g., an AAV particle comprising an AAV capsid variant described herein) for a gene replacement therapy. In some embodiments, the payload encoded by an AAV particle comprising a capsid variant described herein comprises an ARSA protein or variant thereof. In some embodiments, treatment of ALD comprises the use of an AAV particle described herein (e.g., an AAV particle comprising an AAV capsid variant described herein) for a gene replacement therapy. In some embodiments, the payload encoded by an AAV particle comprising a capsid variant described herein comprises an ABCD-1 protein or variant thereof.

[1909] In some embodiments, the AAV particle of the disclosure (e.g., an AAV particle comprising an AAV capsid variant) is useful for the treatment, prophylaxis, palliation, or amelioration of megalencephalic leukoencephalopathy (MLC). In some embodiments, treatment of MLC comprises the use of an AAV particle described herein (e.g., an AAV particle comprising an AAV capsid variant described herein) for a gene replacement therapy. In some embodiments, the payload encoded by an AAV particle comprising a capsid variant described herein comprises an MLC1 protein or variant thereof.

[1910] In some embodiments, the AAV particle of the disclosure (e.g., an AAV particle comprising an AAV capsid variant) is useful for the treatment, prophylaxis, palliation, or amelioration of Krabbe disease. In some embodiments, treatment of Krabbe disease comprises the use of an AAV particle described herein (e.g., an AAV particle comprising an AAV capsid variant described herein) for a gene replacement therapy. In some embodiments, the payload encoded by an AAV particle comprising a capsid variant described herein comprises a GALC protein or variant thereof.

[1911] In some embodiments, the AAV particle of the disclosure (e.g., an AAV particle comprising an AAV capsid variant) is useful for the treatment, prophylaxis, palliation, or amelioration of Mucopolysaccharidosis, e.g., a Type I (MPS I), Type II (MPS II), Type IIIA (MPS IIIA), Type IIIB (MPS IIIB), or Type IIIC (MPS IIIC). In some embodiments, treatment of Mucopolysaccharidosis comprises the use of an AAV particle described herein (e.g., an AAV particle comprising an AAV capsid variant described herein) for a gene replacement therapy or a gene editing therapy (e.g., enhancement or correction). In some embodiments, the payload encoded or corrected by an AAV particle comprising a capsid variant described herein comprises an IDUA protein, IDS protein, SGSH protein, NAGLU protein, HGSNAT protein, or a combination or variant thereof.

[1912] In some embodiments, the AAV particle of the disclosure (e.g., an AAV particle comprising an AAV capsid variant) is useful for the treatment, prophylaxis, palliation, or amelioration of Batten/NCL. In some embodiments, treatment of Batten/NCL comprises the use of an AAV particle described herein (e.g., an AAV particle comprising an AAV capsid variant described herein) for a gene replacement therapy. In some embodiments, the payload encoded by an AAV particle comprising a capsid variant described herein comprises a CLN1 protein, CLN2 protein, CLN3 protein, CLN5 protein, CLN6 protein, CLN7 protein, CLN8 protein, or a combination or variant thereof.

[1913] In some embodiments, the AAV particle of the disclosure (e.g., an AAV particle comprising an AAV capsid variant) is useful for the treatment, prophylaxis, palliation or amelioration of Rett Syndrome. In some embodiments, treatment of Rett Syndrome comprises the use of an AAV particle described herein (e.g., an AAV particle comprising an AAV capsid variant described herein) for a gene replacement therapy. In some embodiments, the payload encoded by an AAV particle comprising a capsid variant described herein comprises an MeCP2 protein or variant thereof.

[1914] In some embodiments, the AAV particle of the disclosure (e.g., an AAV particle comprising an AAV capsid variant) is useful for the treatment, prophylaxis, palliation, or amelioration of Angelman Syndrome. In some embodiments, treatment of Angelman Syndrome comprises the use of an AAV particle described herein (e.g., an AAV particle comprising an AAV capsid variant described herein) for a gene replacement therapy. In some embodiments, the payload encoded by an AAV particle comprising a capsid variant described herein comprises a UBE3A protein or variant thereof.

[1915] In some embodiments, the AAV particle of the disclosure (e.g., an AAV particle comprising an AAV capsid variant) is useful for the treatment, prophylaxis, palliation, or amelioration of Fragile X Syndrome. In some embodiments, treatment of Fragile X Syndrome comprises the use of an AAV particle described herein (e.g., an AAV particle comprising an AAV capsid variant described herein) for a gene replacement therapy. In some embodiments, the payload encoded by an AAV particle comprising a capsid variant described herein comprises a Reelin protein, a DgkK protein, a FMR1 protein, or a combination or variant thereof.

[1916] In some embodiments, the AAV particle of the disclosure (e.g., an AAV particle comprising an AAV capsid variant) is useful for the treatment, prophylaxis, palliation, or amelioration of Canavan Disease. In some embodiments, treatment of Canavan Disease comprises the use of an AAV particle described herein (e.g., an AAV particle comprising an AAV capsid variant described herein) for a gene replacement therapy. In some embodiments, the payload encoded by an AAV particle comprising a capsid variant described herein comprises an ASPA protein or variant thereof.

[1917] In some embodiments, the AAV particle of the disclosure (e.g., an AAV particle comprising an AAV capsid variant) is useful for the treatment, prophylaxis, palliation, or amelioration of a Gangliosidosis, e.g., a GM1 Gangliosidosis or a GM2 Gangliosidosis (e.g., Tay Sachs Sandhoff). In some embodiments, treatment of a Gangliosidosis, e.g., a GM1 Gangliosidosis or a GM2 Gangliosidosis (e.g., Tay Sachs Sandhoff), comprises the use of an AAV particle described herein (e.g., an AAV particle comprising an AAV capsid variant described herein) for a gene replacement therapy. In some embodiments, the payload encoded by an AAV particle comprising a capsid variant described herein comprises a GLB1 protein, a HEXA protein, a HEXB protein, a GM2A protein, or a combination or variant thereof.

[1918] In some embodiments, the AAV particle of the disclosure (e.g., an AAV particle comprising an AAV capsid variant) is useful for the treatment, prophylaxis, palliation, or amelioration of GM3 Synthase Deficiency. In some embodiments, treatment of GM3 Synthase Deficiency comprises the use of an AAV particle described herein (e.g., an AAV particle comprising an AAV capsid variant described herein) for a gene replacement therapy. In some embodiments, the payload encoded by an AAV particle comprising a capsid variant described herein comprises an ST3GAL5 protein or variant thereof.

[1919] In some embodiments, the AAV particle of the disclosure (e.g., an AAV particle comprising an AAV capsid variant) is useful for the treatment, prophylaxis, palliation, or amelioration of a Niemann-Pick disorder, e.g., a Niemann-Pick A or a Niemann-Pick C1 (NPC-1). In some embodiments, treatment of a Niemann-Pick disorder, e.g., a Niemann-Pick A or a Niemann-Pick C1 (NPC-1) comprises the use of an AAV particle described herein (e.g., an AAV particle comprising an AAV capsid variant described herein) for a gene replacement therapy. In some embodiments, the payload encoded by an AAV particle comprising a capsid variant described herein comprises an ASM protein, an NPC1 protein, or variant thereof.

[1920] In some embodiments, the AAV particle of the disclosure (e.g., an AAV particle comprising an AAV capsid variant) is useful for the treatment, prophylaxis, palliation, or amelioration of Schwannoma (e.g., Neuroma). In some embodiments, treatment of Schwannoma (e.g., Neuroma) comprises the use of an AAV particle described herein (e.g., an AAV particle comprising an AAV capsid variant described herein) for a gene replacement therapy. In some embodiments, the payload encoded by an AAV particle comprising a capsid variant described herein comprises a Caspase-1 protein or variant thereof.

[1921] In some embodiments, the AAV particle of the disclosure (e.g., an AAV particle comprising an AAV capsid variant) is useful for the treatment, prophylaxis, palliation, or amelioration of a Tuberous Sclerosis, e.g., Tuberous Sclerosis Type 1 or Tuberous Sclerosis Type 2. In some embodiments, treatment of Tuberous Sclerosis, e.g., Tuberous Sclerosis Type 1 or Tuberous Sclerosis Type 2 comprises the use of an AAV particle described herein (e.g., an AAV particle comprising an AAV capsid variant described herein) for a gene replacement therapy. In some embodiments, the payload encoded by an AAV particle comprising a capsid variant described herein comprises a TSC1 protein, a TSC2 protein, or variant thereof.

[1922] In some embodiments, the AAV particle of the disclosure (e.g., an AAV particle comprising an AAV capsid variant) is useful for the treatment, prophylaxis, palliation, or amelioration of a CDKL5 Deficiency. In some embodiments, treatment of a CDKL5 Deficiency comprises the use of an AAV particle described herein (e.g., an AAV particle comprising an AAV capsid variant described herein) for a gene replacement therapy. In some embodiments, the payload encoded by an AAV particle comprising a capsid variant described herein comprises a CDKL5 protein or variant thereof.

[1923] In some embodiments, the AAV particle of the disclosure (e.g., an AAV particle comprising an AAV capsid variant) is useful for the treatment, prophylaxis, palliation, or amelioration of a Charcot-Marie-Tooth disorder, e.g., a Charcot-Marie-Tooth Type 1X (CMT1X) disorder, a Charcot-Marie-Tooth Type 2A (CMT2A) disorder, or a Charcot-Marie-Tooth Type 4J (CMT4J) disorder. In some embodiments, treatment of a Charcot-Marie-Tooth disorder, e.g., a Charcot-Marie-Tooth Type 1X (CMT1X) disorder, a Charcot-Marie-Tooth Type 2A (CMT2A) disorder, or a Charcot-Marie-Tooth Type 4J (CMT4J) disorder, comprises the use of an AAV particle described herein (e.g., an AAV particle comprising an AAV capsid variant described herein) for a gene replacement therapy. In some embodiments, the payload encoded by an AAV particle comprising a capsid variant described herein comprises a GJB1 protein, a MFN2 protein, a FIG. 4 protein, or variant thereof.

[1924] In some embodiments, the AAV particle of the disclosure (e.g., an AAV particle comprising an AAV capsid variant) is useful for the treatment, prophylaxis, palliation, or amelioration of an Aspartylglucosaminuria (AGU). In some embodiments, treatment of an AGU comprises the use of an AAV particle described herein (e.g., an AAV particle comprising an AAV capsid variant described herein) for a gene replacement therapy. In some embodiments, the payload encoded by an AAV particle comprising a capsid variant described herein comprises an AGA protein or variant thereof.

[1925] In some embodiments, the AAV particle of the disclosure (e.g., an AAV particle comprising an AAV capsid variant) is useful for the treatment, prophylaxis, palliation, or amelioration of a Leigh Syndrome. In some embodiments, treatment of a Leigh Syndrome comprises the use of an AAV particle described herein (e.g., an AAV particle comprising an AAV capsid variant described herein) for a gene replacement therapy. In some embodiments, the payload encoded by an AAV particle comprising a capsid variant described herein comprises a SURF1 protein or variant thereof.

[1926] In some embodiments, the AAV particle of the disclosure (e.g., an AAV particle comprising an AAV capsid variant) is useful for the treatment, prophylaxis, palliation, or amelioration of epilepsy. In some embodiments, treatment of epilepsy comprises the use of an AAV particle described herein (e.g., an AAV particle comprising an AAV capsid variant described herein) for a gene replacement therapy. In some embodiments, the payload encoded by an AAV particle comprising a capsid variant described herein comprises an NPY/Y2 protein, a Galanin protein, a Dynorphin protein, an AIMP2-DX2 protein, an SLC6A1 protein, an SLC13A5 protein, a KCNQ2 protein, or variant thereof.

[1927] In some embodiments, the AAV particle of the disclosure (e.g., an AAV particle comprising an AAV capsid variant) is useful for the treatment, prophylaxis, palliation, or amelioration of a Dravet Syndrome. In some embodiments, treatment of Dravet Syndrome comprises the use of an AAV particle described herein (e.g., an AAV particle comprising an AAV capsid variant described herein) for a gene replacement therapy. In some embodiments, the payload encoded by an AAV particle comprising a capsid variant described herein comprises an SCN1a protein, or variant thereof.

[1928] In some embodiments, the AAV particle of the disclosure (e.g., an AAV particle comprising an AAV capsid variant) is useful for the treatment, prophylaxis, palliation, or amelioration of a Duchenne muscular dystrophy (DMD). In some embodiments, treatment of DMD comprises the use of an AAV particle described herein (e.g., an AAV particle comprising an AAV capsid variant described herein) for a gene replacement therapy or enhancement (e.g., correction of exon-skipping), or a gene editing therapy (e.g., enhancement or correction). In some embodiments, the payload encoded or corrected by an AAV particle comprising a capsid variant described herein comprises a Dystrophin gene and/or protein, a Utrophin gene and/or protein, or a GALGT2 gene and/or protein, or a Follistatin gene and/or protein, or a combination or variant thereof.

[1929] In some embodiments, the AAV particle of the disclosure (e.g., an AAV particle comprising an AAV capsid variant) is useful for the treatment, prophylaxis, palliation, or amelioration of Pompe Disease. In some embodiments, treatment of Pompe Disease comprises the use of an AAV particle described herein (e.g., an AAV particle comprising an AAV capsid variant described herein) for a gene replacement therapy. In some embodiments, the payload encoded by an AAV particle comprising a capsid variant described herein comprises a GAA protein, or variant thereof.

[1930] In some embodiments, the AAV particle of the disclosure (e.g., an AAV particle comprising an AAV capsid variant) is useful for the treatment, prophylaxis, palliation, or amelioration of Limb-Girdle Muscular Dystrophy (LGMD2A). In some embodiments, treatment of LGMD2A comprises the use of an AAV particle described herein (e.g., an AAV particle comprising an AAV capsid variant described herein) for a gene replacement therapy. In some embodiments, the payload encoded by an AAV particle comprising a capsid variant described herein comprises a CAPN-3 protein, DYSF protein, a SGCG protein, a SGCA protein, a SGCB protein, a FKRP protein, a ANO5 protein, or a combination or variant thereof.

[1931] In some embodiments, the AAV particle of the disclosure (e.g., an AAV particle comprising an AAV capsid variant) is useful for the treatment, prophylaxis, palliation, or amelioration of chronic or neuropathic pain.

[1932] In some embodiments, the AAV particle of the disclosure (e.g., an AAV particle comprising AAV capsid variant) is useful for treatment, prophylaxis, palliation, or amelioration of a disease associated with the central nervous system.

[1933] In some embodiments, the AAV particle of the disclosure (e.g., an AAV particle comprising an AAV capsid variant) is useful for treatment, prophylaxis, palliation, or amelioration of a disease associated with the peripheral nervous system.

[1934] In some embodiments, the AAV particle of the disclosure (e.g., an AAV particle comprising an AAV capsid variant) is useful for treatment, prophylaxis, palliation, or amelioration of a neuro-oncological disorder in a subject. In some embodiments, treatment of a neuro-oncological disorder comprises prevention of said neuro-oncological disorder. In some embodiments, a neuro-oncological disorder comprises a cancer of a primary CNS origin (e.g., a CNS cell, a tissue, or a region), or a metastatic cancer in a CNS cell, tissue, or region. Examples of primary CNS cancers could be gliomas (which may include glioblastoma (also known as glioblastoma multiforme), astrocytomas, oligodendrogliomas, and ependymomas, and mixed gliomas), meningiomas, medulloblastomas, neuromas, and primary CNS lymphoma (in the brain, spinal cord, or meninges), among others. Examples of metastatic cancers include those originating in another tissue or organ, e.g., breast, lung, lymphoma, leukemia, melanoma (skin cancer), colon, kidney, prostate, or other types that metastasize to brain.

[1935] In some embodiments, the AAV particle of the disclosure (e.g., an AAV particle comprising an AAV capsid variant) is useful for the treatment, prophylaxis, palliation, or amelioration of a disease associated with expression of HER2, e.g., a disease associated with overexpression of HER2. In some embodiments, the AAV particle of the disclosure (e.g., an AAV particle comprising an AAV capsid variant) is useful for the treatment, prophylaxis, palliation, or amelioration of a HER2-positive cancer. In some embodiments, the HER2-positive cancer is a HER2-positive solid tumor. Additionally, or alternatively, the HER2-positive cancer may be a locally advanced or metastatic HER2-positive cancer. In some instances, the HER2-positive cancer is a HER2-positive breast cancer or a HER2-positive gastric cancer. In some embodiments, the HER2-positive cancer is selected from the group consisting of a HER2-positive gastroesophageal junction cancer, a HER2-positive colorectal cancer, a HER2-positive lung cancer (e.g., a HER2-positive non-small cell lung carcinoma), a HER2-positive pancreatic cancer, a HER2-positive colorectal cancer, a HER2-positive bladder cancer, a HER2-positive salivary duct cancer, a HER2-positive ovarian cancer (e.g., a HER2-positive epithelial ovarian cancer), or a HER2-positive endometrial cancer. In some instances, the HER2-positive cancer is prostate cancer. In some embodiments, the HER2-positive cancer has metastasized to the central nervous system (CNS). In some instances, the metastasized HER2-cancer has formed CNS neoplasms.

[1936] In some embodiments, the AAV particle of the disclosure (e.g., an AAV particle comprising an AAV capsid variant) is useful for treatment, prophylaxis, palliation, or amelioration of a muscular disorder and/or neuromuscular disorder in a subject. In some embodiments, treatment of a muscular disorder and/or neuromuscular disorder comprises prevention of said muscular disorder and/or neuromuscular disorder.

[1937] In some embodiments, the AAV particle of the disclosure (e.g., an AAV particle comprising an AAV capsid variant) is useful for treatment, prophylaxis, palliation or amelioration of a cardiac disease or heart disease and/or method of improving (e.g., enhancing) cardiac function in a subject. In some embodiments, the cardiac disease is a cardiomyopathy (e.g., arrhythmogenic right ventricular cardiomyopathy, dilated cardiomyopathy, or hypertrophic cardiomyopathy), congestive heart failure, tachycardia (e.g., catecholaminergic polymorphic ventricular tachycardia), ischemic heart disease, and/or myocardial infarction. In some embodiments, the cardiac disease is a disease associated with expression, e.g., aberrant expression, of LAMP2B, MYBPC3, TNNI3, LMNA, BAG3, DWORF, PKP2, Cx43, TAZ, CASQ2, SERCA2a, I-1c, S100A1 and/or ARC, S100A1, ASCL1, miR133, Mydelta3, Sav, or a combination or variant thereof. In some embodiments, treatment of a cardiac disorder described herein comprises the use of an AAV particle described herein (e.g., an AAV particle comprising an AAV capsid variant described herein) for a gene replacement therapy.

[1938] In some embodiments, the cardiac disease is a genetic disorder, e.g., an autosomal dominant genetic disorder, an autosomal recessive disorder, or an X-linked recessive genetic disorder. In some embodiments, the cardiomyopathy is a genetic disorder, e.g., a genetic disorder associated with an abnormality (e.g., mutation, insertion, rearrangement and/or deletion) in a gene chosen from TTN, LMNA, MYH7, MYH6, SCN5A, TNNT2, RBM20, TNNI3, MYL2, MYL3, PKP2, DSP, DSG2, DSC2, JUP, or a combination thereof. In some embodiments, the cardiac disorder is a dilated cardiomyopathy, e.g., a dilated cardiomyopathy associated with an abnormality (e.g., mutation, insertion, rearrangement and/or deletion) in a gene chosen from TTN, LMNA, MIH7, BAG3, MIPN, TNNT2, SCN5A, RBN20, TNPO, LAMA4, VCL, LDB3, TCAP, PSEN1/2, ACTN2, CRYAB, TPM1, ABCC9, ACTC1, PDLIM3, ILK, TNNC1, TNNI3, PLN, DES, SGCD, CSRP3, MIH6, EYA4, ANKRD1, DMD, GATAD1, TAZ/G4.5, or combination thereof. In some embodiments, the cardiac disorder is a hypertrophic cardiomyopathy, e.g., a hypertrophic cardiomyopathy associated with an abnormality (e.g., mutation, insertion, rearrangement and/or deletion) in a gene chosen from MYH7, TNNT2, TNNI3, TPM1, MYL2, MYL3, ACTC1, CSRP3, TTN, ACTN2, MYH6, TCAP, TNNC1, or a combination thereof. In some embodiments, the cardiac disorder is an arrhythmogenic ventricular cardiomyopathy, e.g., an arrhythmogenic ventricular cardiomyopathy associated with an abnormality (e.g., mutation, insertion, rearrangement and/or deletion) in a gene chosen from PKP2, DSG2, DSP, RYR2, DSC2, TGFB3, TMEM43, DES, TTN, LMNA, or a combination thereof.

[1939] In some embodiments, the AAV particle of the present disclosure (e.g., an AAV particle comprising an AAV capsid polypeptide, e.g., an AAV capsid variant) is administered to a subject having at least one of the diseases or symptoms described herein. In some embodiments, an AAV particle of the present disclosure is administered to a subject having or diagnosed with having a disease or disorder described herein.

[1940] Any neurological disease or disorder, neurodegenerative disorder, muscular disorder, neuromuscular disorder, and/or neuro-oncological disorder may be treated with the AAV particles of the disclosure, or pharmaceutical compositions thereof, including but not limited to, Absence of the Septum Pellucidum, Acid Lipase Disease, Acid Maltase Deficiency, Acquired Epileptiform Aphasia, Acute Disseminated Encephalomyelitis, Attention Deficit-Hyperactivity Disorder (ADHD), Adie's Pupil, Adie's Syndrome, Adrenoleukodystrophy, Agenesis of the Corpus Callosum, Agnosia, Aicardi Syndrome, Aicardi-Goutieres Syndrome Disorder, AIDS—Neurological Complications, Alexander Disease, Alpers' Disease, Alternating Hemiplegia, Alzheimer's Disease, Amyotrophic Lateral Sclerosis (ALS), Anencephaly, Aneurysm, Angelman Syndrome, Angiomatosis, Anoxia, Antiphospholipid Syndrome, Aphasia, Apraxia, Arachnoid Cysts, Arachnoiditis, Arnold-Chiari Malformation, Arteriovenous Malformation, Asperger Syndrome, Ataxia, Ataxia Telangiectasia, Ataxias and Cerebellar or Spinocerebellar Degeneration, Atrial Fibrillation and Stroke, Attention Deficit-Hyperactivity Disorder, Autism Spectrum Disorder, Autonomic Dysfunction, Back Pain, Barth Syndrome, Batten Disease, Becker's Myotonia, Bechet's Disease, Bell's Palsy, Benign Essential Blepharospasm, Benign Focal Amyotrophy, Benign Intracranial Hypertension, Bernhardt-Roth Syndrome, Binswanger's Disease, Blepharospasm, Bloch-Sulzberger Syndrome, Brachial Plexus Birth Injuries, Brachial Plexus Injuries, Bradbury-Eggleston Syndrome, Brain and Spinal Tumors, Brain Aneurysm, Brain Injury, Brown-Sequard Syndrome, Bulbar palsy, Bulbospinal Muscular Atrophy, Cerebral Autosomal Dominant Arteriopathy with Sub-cortical Infarcts and Leukoencephalopathy (CADASIL), Canavan Disease, Carpal Tunnel Syndrome, Causalgia, Cavernomas, Cavernous Angioma, Cavernous Malformation, Central Cervical Cord Syndrome, Central Cord Syndrome, Central Pain Syndrome, Central Pontine Myelinolysis, Cephalic Disorders, Ceramidase Deficiency, Cerebellar Degeneration, Cerebellar Hypoplasia, Cerebral Aneurysms, Cerebral Arteriosclerosis, Cerebral Atrophy, Cerebral Beriberi, Cerebral Cavernous Malformation, Cerebral Gigantism, Cerebral Hypoxia, Cerebral Palsy, Cerebro-Oculo-Facio-Skeletal Syndrome (COFS), Charcot-Marie-Tooth Disease, Chiari Malformation, Cholesterol Ester Storage Disease, Chorea, Choreoacanthocytosis, Chronic Inflammatory Demyelinating Polyneuropathy (CIDP), Chronic Orthostatic Intolerance, Chronic Pain, Cockayne Syndrome Type II, Coffin Lowry Syndrome, Colpocephaly, Coma, Complex Regional Pain Syndrome, Concentric sclerosis (Baló's sclerosis), Congenital Facial Diplegia, Congenital Myasthenia, Congenital Myopathy, Congenital Vascular Cavernous Malformations, Corticobasal Degeneration, Cranial Arteritis, Craniosynostosis, Cree encephalitis, Creutzfeldt-Jakob Disease, Chronic progressive external ophtalmoplegia, Cumulative Trauma Disorders, Cushing's Syndrome, Cytomegalic Inclusion Body Disease, Cytomegalovirus Infection, Dancing Eyes-Dancing Feet Syndrome, Dandy-Walker Syndrome, Dawson Disease, De Morsier's Syndrome, Dejerine-Klumpke Palsy, Dementia, Dementia—Multi-Infarct, Dementia—Semantic, Dementia—Subcortical, Dementia With Lewy Bodies, Demyelination diseases, Dentate Cerebellar Ataxia, Dentatorubral Atrophy, Dermatomyositis, Developmental Dyspraxia, Devic's Syndrome, Diabetic Neuropathy, Diffuse Sclerosis, Distal hereditary motor neuronopathies, Dravet Syndrome, Dysautonomia, Dysgraphia, Dyslexia, Dysphagia, Dyspraxia, Dyssynergia Cerebellaris Myoclonica, Dyssynergia Cerebellaris Progressiva, Dystonias, Early Infantile Epileptic Encephalopathy, Empty Sella Syndrome, Encephalitis, Encephalitis Lethargica, Encephaloceles, Encephalomyelitis, Encephalopathy, Encephalopathy (familial infantile), Encephalotrigeminal Angiomatosis, Epilepsy, Epileptic Hemiplegia, Episodic ataxia, Erb's Palsy, Erb-Duchenne and Dejerine-Klumpke Palsies, Essential Tremor, Extrapontine Myelinolysis, Faber's disease, Fabry Disease, Fahr's Syndrome, Fainting, Familial Dysautonomia, Familial Hemangioma, Familial Idiopathic Basal Ganglia Calcification, Familial Periodic Paralyses, Familial Spastic Paralysis, Farber's Disease, Febrile Seizures, Fibromuscular Dysplasia, Fisher Syndrome, Floppy Infant Syndrome, Foot Drop, Friedreich's Ataxia, Frontotemporal Dementia, Gaucher Disease, Generalized Gangliosidoses (GM1, GM2), Gerstmann's Syndrome, Gerstmann-Straussler-Scheinker Disease, Giant Axonal Neuropathy, Giant Cell Arteritis, Giant Cell Inclusion Disease, Globoid Cell Leukodystrophy, Glossopharyngeal Neuralgia, Glycogen Storage Disease, Guillain-Barré Syndrome, Hallervorden-Spatz Disease, Head Injury, Headache, Hemicrania Continua, Hemifacial Spasm, Hemiplegia Alterans, Hereditary Neuropathies, Hereditary Spastic Paraplegia, Heredopathia Atactica Polyneuritiformis, Herpes Zoster, Herpes Zoster Oticus, Hirayama Syndrome, Holmes-Adie syndrome, Holoprosencephaly, HTLV-1 Associated Myelopathy, Hughes Syndrome, Huntington's Disease, Hurler syndrome, Hydranencephaly, Hydrocephalus, Hydrocephalus—Normal Pressure, Hydromyelia, Hypercortisolism, Hypersomnia, Hypertonia, Hypotonia, Hypoxia, Immune-Mediated Encephalomyelitis, Inclusion Body Myositis, Incontinentia Pigmenti, Infantile Hypotonia, Infantile Neuroaxonal Dystrophy, Infantile Phytanic Acid Storage Disease, Infantile Refsum Disease, Infantile Spasms, Inflammatory Myopathies, Iniencephaly, Intestinal Lipodystrophy, Intracranial Cysts, Intracranial Hypertension, Isaacs' Syndrome, Joubert Syndrome, Kearns-Sayre Syndrome, Kennedy's Disease, Kinsbourne syndrome, Kleine-Levin Syndrome, Klippel-Feil Syndrome, Klippel-Trenaunay Syndrome (KTS), Kliiver-Bucy Syndrome, Korsakoffs Amnesic Syndrome, Krabbe Disease, Kugelberg-Welander Disease, Kuru, Lambert-Eaton Myasthenic Syndrome, Landau-Kleffner Syndrome, Lateral Femoral Cutaneous Nerve Entrapment, Lateral Medullary Syndrome, Learning Disabilities, Leigh's Disease, Lennox-Gastaut Syndrome, Lesch-Nyhan Syndrome, Leukodystrophy, Levine-Critchley Syndrome, Lewy Body Dementia, Lichtheim's disease, Lipid Storage Diseases, Lipoid Proteinosis, Lissencephaly, Locked-In Syndrome, Lou Gehrig's Disease, Lupus—Neurological Sequelae, Lyme Disease—Neurological Complications, Lysosomal storage disorders, Machado-Joseph Disease, Macrencephaly, Megalencephaly, Melkersson-Rosenthal Syndrome, Meningitis, Meningitis and Encephalitis, Menkes Disease, Meralgia Paresthetica, Metachromatic Leukodystrophy, Microcephaly, Migraine, Miller Fisher Syndrome, Mini Stroke, Mitochondrial Myopathy, Mitochondrial DNA depletion syndromes, Moebius Syndrome, Monomelic Amyotrophy, Morvan Syndrome, Motor Neuron Diseases, Moyamoya Disease, Mucolipidoses, Mucopolysaccharidoses, Multi-Infarct Dementia, Multifocal Motor Neuropathy, Multiple Sclerosis, Multiple System Atrophy, Multiple System Atrophy with Orthostatic Hypotension, Muscular Dystrophy, Myasthenia—Congenital, Myasthenia Gravis, Myelinoclastic Diffuse Sclerosis, Myelitis, Myoclonic Encephalopathy of Infants, Myoclonus, Myoclonus epilepsy, Myopathy, Myopathy—Congenital, Myopathy—Thyrotoxic, Myotonia, Myotonia Congenita, Narcolepsy, NARP (neuropathy, ataxia and retinitis pigmentosa), Neuroacanthocytosis, Neurodegeneration with Brain Iron Accumulation, Neurodegenerative disease, Neurofibromatosis, Neuroleptic Malignant Syndrome, Neurological Complications of AIDS, Neurological Complications of Lyme Disease, Neurological Consequences of Cytomegalovirus Infection, Neurological Manifestations of Pompe Disease, Neurological Sequelae Of Lupus, Neuromyelitis Optica, Neuromyotonia, Neuronal Ceroid Lipofuscinosis, Neuronal Migration Disorders, Neuropathic pain, Neuropathy—Hereditary, Neuropathy, Neurosarcoidosis, Neurosyphilis, Neurotoxicity, Nevus Cavernosus, Niemann-Pick Disease, O'Sullivan-McLeod Syndrome, Occipital Neuralgia, Ohtahara Syndrome, Olivopontocerebellar Atrophy, Opsoclonus Myoclonus, Orthostatic Hypotension, Overuse Syndrome, Pain—Chronic, Pantothenate Kinase-Associated Neurodegeneration, Paraneoplastic Syndromes, Paresthesia, Parkinson's Disease, Paroxysmal Choreoathetosis, Paroxysmal Hemicrania, Parry-Romberg, Pelizaeus-Merzbacher Disease, Pena Shokeir II Syndrome, Perineural Cysts, Peroneal muscular atrophy, Periodic Paralyses, Peripheral Neuropathy, Periventricular Leukomalacia, Persistent Vegetative State, Pervasive Developmental Disorders, Phytanic Acid Storage Disease, Pick's Disease, Pinched Nerve, Piriformis Syndrome, Pituitary Tumors, Polymyositis, Pompe Disease, Porencephaly, Post-Polio Syndrome, Postherpetic Neuralgia, Postinfectious Encephalomyelitis, Postural Hypotension, Postural Orthostatic Tachycardia Syndrome, Postural Tachycardia Syndrome, Primary Dentatum Atrophy, Primary Lateral Sclerosis, Primary Progressive Aphasia, Prion Diseases, Progressive bulbar palsy, Progressive Hemifacial Atrophy, Progressive Locomotor Ataxia, Progressive Multifocal Leukoencephalopathy, Progressive Muscular Atrophy, Progressive Sclerosing Poliodystrophy, Progressive Supranuclear Palsy, Prosopagnosia, Pseudobulbar palsy, Pseudo-Torch syndrome, Pseudotoxoplasmosis syndrome, Pseudotumor Cerebri, Psychogenic Movement, Ramsay Hunt Syndrome I, Ramsay Hunt Syndrome II, Rasmussen's Encephalitis, Reflex Sympathetic Dystrophy Syndrome, Refsum Disease, Refsum Disease—Infantile, Repetitive Motion Disorders, Repetitive Stress Injuries, Restless Legs Syndrome, Retrovirus-Associated Myelopathy, Rett Syndrome, Reye's Syndrome, Rheumatic Encephalitis, Riley-Day Syndrome, Sacral Nerve Root Cysts, Saint Vitus Dance, Salivary Gland Disease, Sandhoff Disease, Schilder's Disease, Schizencephaly, Seitelberger Disease, Seizure Disorder, Semantic Dementia, Septo-Optic Dysplasia, Severe Myoclonic Epilepsy of Infancy (SMEI), Shaken Baby Syndrome, Shingles, Shy-Drager Syndrome, Sjögren's Syndrome, Sleep Apnea, Sleeping Sickness, Sotos Syndrome, Spasticity, Spina Bifida, Spinal Cord Infarction, Spinal Cord Injury, Spinal Cord Tumors, Spinal Muscular Atrophy, Spinocerebellar Ataxia, Spinocerebellar Atrophy, Spinocerebellar Degeneration, Sporadic ataxia, Steele-Richardson-Olszewski Syndrome, Stiff-Person Syndrome, Striatonigral Degeneration, Stroke, Sturge-Weber Syndrome, Subacute Sclerosing Panencephalitis, Subcortical Arteriosclerotic Encephalopathy, Short-lasting, Unilateral, Neuralgiform (SUNCT) Headache, Swallowing Disorders, Sydenham Chorea, Syncope, Syphilitic Spinal Sclerosis, Syringohydromyelia, Syringomyelia, Systemic Lupus Erythematosus, Tabes Dorsalis, Tardive Dyskinesia, Tarlov Cysts, Tay-Sachs Disease, Temporal Arteritis, Tethered Spinal Cord Syndrome, Thomsen's Myotonia, Thoracic Outlet Syndrome, Thyrotoxic Myopathy, Tic Douloureux, Todd's Paralysis, Tourette Syndrome, Transient Ischemic Attack, Transmissible Spongiform Encephalopathies, Transverse Myelitis, Traumatic Brain Injury, Tremor, Trigeminal Neuralgia, Tropical Spastic Paraparesis, Troyer Syndrome, Tuberous Sclerosis, Vascular Erectile Tumor, Vasculitis Syndromes of the Central and Peripheral Nervous Systems, Vitamin B12 deficiency, Von Economo's Disease, Von Hippel-Lindau Disease (VHL), Von Recklinghausen's Disease, Wallenberg's Syndrome, Werdnig-Hoffman Disease, Wernicke-Korsakoff Syndrome, West Syndrome, Whiplash, Whipple's Disease, Williams Syndrome, Wilson Disease, Wolman's Disease, X-Linked Spinal and Bulbar Muscular Atrophy.

### Pharmaceutical Composition and Formulations

[1941] According to the present disclosure, an AAV particle comprising an AAV capsid variant described herein may be prepared as a pharmaceutical composition. In some embodiments, the pharmaceutical composition comprises at least one active ingredients. In some embodiments, the pharmaceutical composition comprises a pharmaceutically acceptable excipient.

[1942] In some embodiments, an AAV particle of the present disclosure (e.g., an AAV particle comprising an AAV capsid polypeptide, e.g., an AAV capsid variant) can be formulated using an excipient to: (1) increase stability; (2) increase cell transfection or transduction; (3) permit the sustained or delayed expression of the payload; (4) alter the biodistribution (e.g., target the viral particle to specific tissues or cell types); (5) increase the translation of encoded protein; (6) alter the release profile of encoded protein; and/or (7) allow for regulatable expression of the payload. Formulations of the present disclosure can include, without limitation, saline, liposomes, lipid nanoparticles, polymers, peptides, proteins, cells transfected with viral vectors (e.g., for transfer or transplantation into a subject) and combinations thereof.

[1943] In some embodiments, the relative amount of the active ingredient (e.g. an AAV particle comprising an AAV capsid variant described herein), a pharmaceutically acceptable excipient, and/or any additional ingredients in a pharmaceutical composition in accordance with the present disclosure may vary, depending upon the identity, size, and/or condition of the subject being treated and further depending upon the route by which the composition is to be administered. For example, the composition may comprise between 0.1% and 99% (w/w) of the active ingredient. By way of example, the composition may comprise between 0.1% and 100%, e.g., between 0.5 and 50%, between 1-30%, between 5-80%, at least 80% (w/w) active ingredient.

[1944] In some embodiments, the pharmaceutical composition comprising an AAV particle described herein may comprise an AAV capsid variant and a viral genome encoding a payload, e.g., a payload described herein, with or without a pharmaceutically acceptable excipient.

[1945] The present disclosure also provides in some embodiments, a pharmaceutical composition suitable for administration to a subject, e.g., a human. In some embodiments, the pharmaceutical composition is administered to a subject, e.g., a human.

[1946] Also provided herein are formulations, e.g., optimized stable formulations for AAV particles and variants thereof, e.g., comprising an AAV capsid variant described herein (e.g., an AAV capsid variant comprising an amino acid sequence described herein, e.g., in any one of Tables 1A, 1B, 2-7, 10-11, or 20, or the amino acid sequence of SEQ ID NO: 3636, or a variant thereof). Without wishing to be bound by theory, it is believed in some embodiments, that such formulations are advantageous over conventional formulations (e.g., PBS-based formulations), for example, in terms of stability under various storage conditions, the ability to support viral concentrations >1×10¹³ vg/ml, and having desirable characteristics over a wide range of parameters, such as pH, pI, osmolality, osmolarity, occupancy (e.g., % full capsids), and aggregation.

[1947] In some embodiments, the formulation comprises a buffering agent. Non-limiting examples of buffering agents include, e.g., Tris base, Tris Hcl, Bis-tris propane (BTP), phosphate-buffered saline (PBS), sodium phosphate (monosodium phosphate and/or disodium phosphate), potassium phosphate (monopotassium phosphate and/or dipotassium phosphate), histidine, boric acid, citric acid, glycine, HEPES (4-(2-hydroxyethyl)-1-piperazineethanesulfonic acid), and MOPS (3-(N-morpholino)propanesulfonic acid). In some embodiments, the buffering agent is Tris.

[1948] In some embodiments the formulation comprises a salt. Non-limiting examples of salts include, e.g., sodium chloride, potassium chloride, magnesium chloride. In some embodiments, the salt is sodium chloride.

[1949] In some embodiments, the formulation comprises a polyether, e.g., a polyether with low molecular weight (e.g., 200-500)). Non-limiting examples of polyethers include, e.g., glycerol, glycerin, and PEG (e.g., low-molecular-weight PEG, e.g., PEG-300). In some embodiments, the polyether is glycerol. In some embodiments, the polyether is PEG (e.g., low-molecular-weight PEG, e.g., PEG-300).

[1950] In some embodiments, at least one of the components of the formulation is a sugar, such as a disaccharide, or a sugar substitute. Non-limiting examples of sugars (e.g., disaccharide sugars) include trehalose, sucrose, lactulose, lactose, maltose, trehalose, cellobiose, chitobiose, kojibiose, nigerose, isomaltose, β,β-trehalose, α,β-trehalose, sophorose, laminaribiose, gentiobiose, turanose, maltulose, palatinose, gentiobiulose, mannobiose, melibiose, melibiulose, rutinose, rutinulose, saccharose, and xylobiose. A non-limiting example of a sugar substitute is sorbitol. In some embodiments, the sugar is trehalose.

[1951] In some embodiments, the formulation comprises a surfactant, for example, an anionic, zwitterionic, or non-ionic surfactant. Non-limiting examples of anionic surfactants include, e.g., sulfate, sulfonate, phosphate esters, and carboxylates. Non-limiting examples of nonionic surfactants include, e.g., ehoxylates, fatty alcohol ethoxylates, alkylphenol ethoxylates (e.g., nonoxynols, Triton X-100), fatty acid ethoxylates, ethoxylated amines and/or fatty acid amides (e.g., polyethoxylated tallow amine, cocamide monoethanolamine, cocamide diethanolamine), ethylene oxide/propylene oxide copolymer (e.g., poloxamers such as Pluronic® F-68 or F-127), esters of fatty acids and polyhydric alcohols, fatty acid alkanolamides, ethoxylated aliphatic acids, ethoxylated aliphatic alcohols, ethoxylated sorbitol fatty acid esters, ethoxylated glycerides, ethoxylated block copolymers with EDTA (ethylene diaminetetraacetic acid), ethoxylated cyclic ether adducts, ethoxylated amide and imidazoline adducts, ethoxylated amine adducts, ethoxylated mercaptan adducts, ethoxylated condensates with alkyl phenols, ethoxylated nitrogen-based hydrophobes, ethoxylated polyoxypropylenes, polymeric silicones, fluorinated surfactants, and polymerizable surfactants. Non-limiting examples of zwitterionic surfactants include, e.g., alkylamido betaines and amine oxides thereof, alkyl betaines and amine oxides thereof, sulfo betaines, hydroxy sulfo betaines, amphoglycinates, amphopropionates, balanced amphopolycarboxyglycinates, and alkyl polyaminoglycinates. In some embodiments, the surfactant is a poloxamer, e.g., Pluronic® F-68 or F-127. In some embodiments, the surfactant is Pluronic® F-68.

[1952] In some embodiments, the formulation comprises (a) an AAV particle or variant thereof described herein, e.g., an AAV particle comprising an AAV capsid variant described herein, (b) a buffering agent (e.g., Tris), and (c) a polyether (e.g., glycerol).

[1953] In some embodiments, the formulation comprises (a) an AAV particle or variant thereof described herein, e.g., an AAV particle comprising an AAV capsid variant described herein, (b) a buffering agent (e.g., Tris), and (c) a sugar (e.g., trehalose).

[1954] In some embodiments, the formulation comprises (a) an AAV particle or variant thereof described herein, e.g., an AAV particle comprising an AAV capsid variant described herein, (b) a buffering agents (e.g., Tris), (c) a polyether (e.g., glycerol), and (d) a salt (e.g., sodium chloride).

[1955] In some embodiments, the formulation comprises (a) an AAV particle or variant thereof as described herein, e.g., an AAV particle comprising an AAV capsid variant described herein, (b) a buffering agent (e.g., Tris), (c) a sugar (e.g., trehalose), and (d) a salt (e.g., sodium chloride).

[1956] In some embodiments, the formulation comprises (a) an AAV particle or variant thereof, e.g., an AAV particle comprising an AAV capsid variant described herein, (b) a buffering agent (e.g., Tris), (c) a polyether (e.g., glycerol), and (d) a surfactant (e.g., ethylene oxide/propylene oxide copolymer).

[1957] In some embodiments, the formulation comprises (a) an AAV particle or variant thereof, e.g., an AAV particle comprising an AAV capsid variant described herein, (b) a buffering agent (e.g., Tris), (c) a sugar (e.g., trehalose), and (d) a surfactant (e.g., ethylene oxide/propylene oxide copolymer).

[1958] In some embodiments, the formulation comprises (a) an AAV particle or variant thereof, e.g., an AAV particle comprising an AAV capsid variant described herein, (b) a buffering agent (e.g., Tris), (c) a salt (e.g., sodium chloride), (d) a polyether (e.g., glycerol), and (e) a surfactant (e.g., ethylene oxide/propylene oxide copolymer).

[1959] In some embodiments, the formulation comprises (a) an AAV particle or variant thereof, e.g., an AAV particle comprising an AAV capsid variant described herein, (b) a buffering agent (e.g., Tris), (c) a salt (e.g., sodium chloride), (d) a sugar (e.g., trehalose), and (e) a surfactant (e.g., ethylene oxide/propylene oxide copolymer).

[1960] In some embodiments, the formulation is an aqueous formulation. In some embodiments, the formulation is an isotonic solution (e.g., a solution comprising an osmolarity of about 270-310 mOsm/L). In some embodiments, the formulation comprises an osmolarity greater than 310 mOsm/L.

[1961] In some embodiments, the buffering agent in a formulation described herein is Tris. The buffering agent is a weak acid or base that, when used in the formulation, maintains the pH of the formulation near a chosen value even after another acid or base is added to the formulation. In some embodiments, the buffering agent is capable of maintaining a pH of 7.8-8.4 (e.g., 7.8, 7.9, 8.0, 8.1, 8.2, 8.3, or 8.4). In some embodiments, buffering agent (e.g., Tris) is present at a concentration of between 1-50 mM, for example, about 1 mM, about 5 mM, about 10 mM, about 15 mM, about 20 mM, about 25 mM, about 30 mM, about 35 mM, about 40 mM, about 50 mM, 1-40 mM, 1-30 mM, 1-20 mM, 1-10 mM, 5-40 mM, 5-35 mM, 5-30 mM, 5-25 mM, 5-20 mM, 5-15 mM, 5-10 mM, 10-40 mM, 10-35 mM, 10-30 mM, 10-25 mM, 10-20 mM, 10-15 mM, 15-40 mM, 15-35 mM, 15-30 mM, 15-25 mM, 15-20 mM, 20-50 mM, 20-40 mM, 20-35 mM, 20-30 mM, 20-25 mM, 25-50 mM, 25-40 mM, 25-35 mM, 25-30 mM, 30-50 mM, 30-40 mM, 30-35 mM, 40-50 mM, 45-50 mM. In some embodiments, the formulation comprises Tris at a concentration of 15-25 mM, e.g., 20 mM Tris or about 20 mM Tris.

[1962] In some embodiments, the salt in a formulation described herein is sodium chloride. In some embodiments, the salt (e.g., sodium chloride) is present at a concentration of between 30-80 mM, for example, about 40 mM, about 45 mM, about 50 mM, about 55 mM, about 60 mM, about 65 mM, about 70 mM, about 75 mM, about 80 mM, 40-80 mM, 50-80 mM, 60-80 mM, 70-80 mM, 40-70 mM, 50-70 mM, 60-70 mM, 40-65 mM, 50-65 mM or 60-65 mM. In some embodiments, the salt is present at a concentration between 70-135 mM, e.g., 70-90 mM or 70-100 mM. In some embodiments, the formulation comprises sodium chloride at a concentration of 60-65 mM, e.g., 62.5 mM sodium chloride or about 62.5 mM sodium chloride.

[1963] In some embodiments, the polyether in a formulation described herein is glycerol. In some embodiments, the polyether (e.g., glycerol) is present at a concentration of between 0.25%-5%, for example, about 0.25%, about 0.5%, about 1%, about 1.5%, about 2.0%, about 2.5%, about 3.0%, about 3.5%, about 4.0%, about 4.5%, about 5%, 0.5-5.0%, 1.0-5.0%, 1.5%-5.0%, 2.0%-5.0%, 2.5%-5.0%, 3.0-5.0%, 3.5-5.0%, 4.0-5.0%, 4.5-5.0%, 0.25-4.0%, 0.5-4.0%, 1.0-4.0%, 1.5-4.0%, 2.0-4.0%, 2.5-4.0%, 3.0-4.0%, 3.5-4.0%, 0.25-3.5%, 0.5-3.5%, 1.0-3.5%, 1.5-3.5%, 2.0-3.5%, 2.5-3.5%, 3.0-3.5%, 0.25-3.0%, 0.5-3.0%, 1.0-3.0%, 1.5-3.0%, 2.0-3.0%, 2.5-3.0%, 0.25-2.5%, 0.5-2.5%, 1.0-2.5%, 1.5-2.5%, 2.0-2.5%, 0.25-2.0%, 0.5-2.0%, 1.0-2.0%, 1.5-2.0%, 0.25-1.5%, 0.5-1.5%, 1.0-1.5%, 0.25-1.0%, 0.5-1.0%, 0.75-3.0%, 0.75-1.25%, or 2.25-2.75%. In some embodiments, the polyether is present at a concentration of about 3-7.5%, e.g., about 3-7%, 4-7%, 4.5-7.5%, 4.5-7%, 5-7.5%, 5-7%, 5.5-7.5%, 5.5-7%, 6-7.5%, 6-7%, 6.5-7%, 6.5-7.5%, 5-6%, 5-6.5%, 5.5-6.5%, 5.5-6%, 4-6.5%, 4-6%, 3-5%, 3-5.5%, 3-6%, 3-6.5%, 3-4%, 3.5-7%, or 3.5-7.5%. In some embodiments, the formulation comprises glycerol at a concentration of about 0.75-1.25%, 2.25-2.75%, or 3-5%. In some embodiments, the formulation comprises glycerol at a concentration of 1% or about 1%. In some embodiments, the formulation comprises glycerol at a concentration of 2.5% or about 2.5%. In some embodiments, the polyether in the formulation is glycerin.

[1964] In some embodiments, the polyether in a formulation described herein is polyethylene glycol (PEG). In some embodiments, the PEG is low molecular weight PEG. In some embodiments, the PEG has a molecular weight ≤300, for example, ≤290, ≤280, ≤270, ≤260, ≤250, ≤240, ≤230, ≤220, ≤210, ≤200, 200-500, 250-500, 300-500, 350-500, 400-500, 450-500, 200-450, 250-450, 300-450, 350-450, 400-450, 200-400, 250-400, 300-400, 350-400, 200-350, 250-350, 300-350, 200-300, 250-300, 275-325, or 290-310. In some embodiments, the formulation comprises PEG having a molecular weight of 275-325. In some embodiments, the formulation comprises PEG having a molecular weight of 300 or about 300 (e.g., PEG-300).

[1965] In some embodiments, the sugar in a formulation described herein is trehalose. In some embodiments, the sugar (e.g., trehalose) is present at a concentration of between 3-9%, for example, about 3%, about 3.5%, about 4.0%, about 4.5%, about 5%, about 5.5%, about 6%, about 6.5%, about 7.0%, about 7.5%, about 8.0%, about 8.5%, about 9.0%, 3.5-9.0%, 4.0-9.0%, 4.5-9.0%, 5.0-9.0%, 5.5-9.0%, 6.0-9.0%, 6.5-9.0%, 7.0-9.0%, 7.5-9.0%, 8.0-9.0%, 8.5-9.0%, 3.0-8.0%, 3.5-8.0%, 4.0-8.0%, 4.5-8.0%, 5.0-8.0%, 5.5-8.0%, 6.0-8.0%, 6.5-8.0%, 7.0-8.0%, 7.5-8.0%, 3.0-7.5%, 3.5-7.5%, 4.0-7.5%, 4.5-7.5%, 5.0-7.5%, 5.5-7.5%, 6.0-7.5%, 6.5-7.5%, 7.0-7.5%, 3.0-7.0%, 3.5-7.0%, 4.0-7.0%, 4.5-7.0%, 5.0-7.0%, 5.5-7.0%, 6.0-7.0%, 6.5-7.0%, 3.0-6.5%, 3.5-6.5%, 4.0-6.5%, 4.5-6.5%, 5.0-6.5%, 5.5-6.5%, 6.0-6.5%, 3.0-6.0%, 3.5-6.0%, 4.0-6.0%, 4.5-6.0%, 5.0-6.0%, 5.5-6.0%, 3.0-5.5%, 3.5-5.5%, 4.0-5.5%, 4.5-5.5%, 5.0-5.5%, 3.0-5.0%, 3.5-5.0%, 4.0-5.0%, 4.5-5.0%, 3.0-4.5%, 3.5-4.5%, 3.0-4.5%, 3.0-4.0%, 3.5-4.0%, 5.75-6.25, 5.8-6.2, or 5.9-6.1. In some embodiments, the formulation comprises trehalose at a concentration of 5.8-6.2%. In some embodiments, the formulation comprises trehalose at a concentration of 5.95% or about 5.95%.

[1966] In some embodiments, a formulation described herein comprises a sugar, e.g., trehalose, at the same overall molecular weight (Da) by density (g/cm³), e.g., assuming saturated equivalence to that of 100% glycerol, v/v. In some embodiments, the density of glycerol in the formulation is 1.26 g/cm³ (e.g., 1.60% equivalent). In some embodiments, the density of trehalose in the formulation is 1.58 g/cm³ (e.g., 5.95% equivalent).

[1967] In some embodiments, the surfactant in a formulation described herein is Pluronic F68. In some embodiments, the surfactant (e.g., an ethylene oxide/propylene oxide copolymer such as a poloxamer (e.g., Pluronic F68)) is present at a concentration (w/v) of between 0.0002-0.002%, for example, 0.0004-0.002%, 0.0006-0.002%, 0.0008-0.002%, 0.001-0.002%, 0.0012-0.002%, 0.0014-0.002%, 0.0016-0.002%, 0.0018-0.002%, 0.0002-0.0018%, 0.0004-0.0018%, 0.0006-0.0018%, 0.0008-0.0018%, 0.001-0.0018%, 0.0012-0.0018%, 0.0014-0.0018%, 0.0016-0.0018%, 0.0002-0.0016%, 0.0004-0.0016%, 0.0006-0.0016%, 0.0008-0.0016%, 0.001-0.0016%, 0.0012-0.0016%, 0.0014-0.0016%, 0.0002-0.0014%, 0.0004-0.0014%, 0.0006-0.0014%, 0.0008-0.0014%, 0.001-0.0014%, 0.0012-0.0014%, 0.0002-0.0012%, 0.0004-0.0012%, 0.0006-0.0012%, 0.0008-0.0012%, 0.001-0.0012%, 0.0002-0.0010%, 0.0004-0.0010%, 0.0006-0.0010%, 0.0008-0.0010%, 0.0002-0.0008%, 0.0004-0.0008%, 0.0006-0.0008%, 0.0002-0.0006%, 0.0004-0.0006%, 0.0002-0.0004%, or 0.0009-0.0011. In some embodiments, the formulation comprises Pluronic F68 at a concentration of 0.0008-0.0012%. In some embodiments, the formulation comprises Pluronic F68 at a concentration of 0.001% or about 0.001%.

[1968] In some embodiments, the formulations provided herein exhibits one, two, three, four, five, six, seven, or all of the following properties: (a) a pH in the range of between 6-9, for example, a pH of about 6.0, about 6.2, about 6.4, about 6.6, about 6.8, about 7.0, about 7.2, about 7.4, about 7.6, about 7.8, about 8.0, about 8.1, about 8.2, about 8.3, about 8.4, about 8.5, about 8.6, about 8.7, about 8.8, about 8.9, about 9.0, 6.0-8.5, 6.0-7.5, 6.0-7.0, 6.0-6.5, 6.5-9.0, 6.5-8.5, 6.5-8.0, 6.5-7.5, 6.5-7.0, 7.0-9.0, 7.0-8.5, 7.0-8.0, 7.0-7.5, 7.5-9.0, 7.5-8.5, 7.5-8.0, 8.0-9.0, 8.0-8.9, 8.0-8.8, 8.0-8.7, 8.0-8.6, 8.0-8.5, 8.0-8.4, 8.0-8.3, 8.0-8.2, 8.0-8.1, 7.8-8.5, 7.9-8.3, or 7.9-8.2, as assessed by, e.g., a pH meter, as described in Example 9; (b) an osmolality (mOsm/kg) in the range of between 250-650, for example, 250-650, 250-600, 250-550, 250-500, 250-450, 250-400, 250-350, 250-300, 300-650, 300-600, 300-550, 300-500, 300-450, 300-400, 300-350, 350-650, 350-600, 350-550, 350-500, 350-450, 350-400, 400-650, 400-600, 400-550, 400-500, 400-450, 450-650, 450-600, 450-550, 450-500, 500-650, 500-600, 500-550, 550-650, 550-600, 310-400, 320-400, 330-400, 340-400, 350-400, 360-400, 370-400, 380-400, 390-400, 300-390, 300-380, 300-370, 300-360, 300-350, 300-340, 300-330, 300-320, or 300-310, as assessed by, e.g., an osmometer as described in Example 9. as assessed by, e.g., an osmometer as described in Example 9; (c) a viral titer (e.g., TTD-001 titer)>1×10¹² vg/ml, for example, >2×10¹² vg/ml, >4×10¹² vg/ml, >6×10¹² vg/ml, >8×10¹² vg/ml, >1.0×10¹³ vg/ml, >1.5×10¹³ vg/ml, >2.0×10¹³ vg/ml, >2.5×10¹³ vg/ml, >3.0×10¹³ vg/ml, >3.5×10¹³ vg/ml, >4.0×10¹³ vg/ml, >4.5×10¹³ vg/ml, >5.0×10¹³ vg/ml, >5.5×10¹³ vg/ml, >6.0×10¹³ vg/ml, >6.5×10¹³ vg/ml, >7.0×10¹³ vg/ml, >7.5×10¹³ vg/ml, >8.0×10¹³ vg/ml, >8.5×10¹³ vg/ml, >9.0×10¹³ vg/ml, >9.5×10¹³ vg/ml, >1.0×10¹⁴ vg/ml, 1.0×10¹²-1.0×10¹⁴ vg/ml, 2×10¹²-1.0×10¹⁴ vg/ml, 4.0×10¹²-1.0×10¹⁴ vg/ml, 6.0×10¹²-1.0×10¹⁴ vg/ml, 8.0×10¹²-1.0×10¹⁴ vg/ml, 1.0×10¹³-1.0×10¹⁴ vg/ml, 1.5×10¹³-1.0×10¹⁴ vg/ml, 2.0×10¹³-1.0×10¹⁴ vg/ml, 2.5×10¹³-1.0×10¹⁴ vg/ml, 3.0×10¹³-1.0×10¹⁴ vg/ml, 3.5×10¹³-1.0×10¹⁴ vg/ml, 4.0×10¹³-1.0×10¹⁴ vg/ml, 4.5×10¹³-1.0×10¹⁴ vg/ml, 5.0×10¹³-1.0×10¹⁴ vg/ml, 6.0×10¹³-1.0×10¹⁴ vg/ml, 7.0×10¹³-1.0×10¹⁴ vg/ml, 8.0×10¹³-1.0×10¹⁴ vg/ml, 9.0×10¹³-1.0×10¹⁴ vg/ml, 1.0×10¹³-9.0×10¹³ vg/ml, 1.0×10¹³-8.0×10¹³ vg/ml, 1.0×10¹³-7.0×10¹³ vg/ml, 1.0×10¹³-6.0×10¹³ vg/ml, 1.0×10¹³-5.0×10¹³ vg/ml, 1.0×10¹³-4.5×10¹³ vg/ml, 1.0×10¹³-4.0×10¹³ vg/ml, 1.0×10¹³-3.5×10¹³ vg/ml, 1.0×10¹³-3.0×10¹³ vg/ml, 1.0×10¹³-2.5×10¹³ vg/ml, 1.0×10¹³-2.0×10¹³ vg/ml, or 1.0×10¹³-1.5×10¹³ vg/ml, as assessed by, e.g., qPCR as described in Example 9; (d) occupancy (% full capsids)≥30%, for example, ≥35%, ≥40%, ≥45%, ≥50%, ≥55%, ≥60%, ≥65%, ≥70%, ≥75%, ≥80%, ≥85%, ≥90%, ≥95%, 30%-90%, 30%-80%, 30%-70%, 30%-65%, 30%-60%, 30%-55%, 30%-50%, 30%-45%, 30%-40%, 30%-35%, 35%-90%, 35%-80%, 35%-75%, 35%-70%, 35%-65%, 35%-60%, 35%-55%, 35%-50%, 35%-45%, 35%-40%, 40%-90%, 40%-80%, 40%-70%, 40%-65%, 40%-60%, 40%-55%, 40%-50%, 40%-45%, 45%-90%, 45%-80%, 45%-70%, 45%-65%, 45%-60%, 45%-55%, 45%-50%, 50%-90%, 50%-80%, 50%-70%, 50%-65%, 50%-60%, 50%-55%, 55%-90%, 55%-80%, 55%-70%, 55%-65%, 55%-60%, 60%-90%, 60%-80%, 60%-70%, 70%-90%, 70%-80%, or 80%-90%, as assessed by, e.g., SEC-MALS as described in Example 9; (e) aggregation≤10%, for example, ≤9%, ≤8%, ≤7%, ≤6%, ≤5%, ≤4%, ≤3%, ≤2%, ≤1%, 0-10%, 0-8%, 0-6%, 0-5%, 0-4%, 0-3%, 0-2%, 0-1%, 1-10%, 2-10%, 3-10%, 4-10%, 5-10%, 1-5%, 2-5%, or 3-5%, as assessed by % HMW using size exclusion chromatography (SEC), for example, SEC-FLD/DLS or SEC-MALS, as described in Example 9; (f) a viral titer higher than the viral titer supported by a formulation comprising PBS and 0.001% Pluronic F68 (modified PBS formulation) (e.g., higher by at least 50%, at least 100%, at least 250%, at least 500%, at least 750%, at least 1000% (e.g., one order of magnitude), at least 2000%, at least 4000%, at least 6000%, at least 8000%, at least 10,000% (e.g., two orders of magnitude), at least 25,000%, at least 50,000%, 500-50,000%, 1000-50,000%, 2500-50,000%, 5000-50,000%, 7500-50,000%, 10,000-50,000%, 25,000-50,000%, 500-25,000%, 1000-25,000%, 2500-25,000%, 5000-25,000%, 7500-25,000%, 10,000-25,000%, 500-10,000%, 1000-10,000%, 2500-10,000%, 5000-10,000%, 7500-10,000%, 500-7500%, 1000-7500%, 2500-7500%, 5000-7500%, 500-5000%, 1000-7500%, or 2500-5000%), as assessed by, e.g., qPCR as described in Example 9; (g) occupancy (% full capsids) higher than the occupancy supported by a formulation comprising PBS and 0.001% Pluronic F68 (modified PBS formulation) (e.g., higher relative to the modified PBS formulation by, e.g., ≥10%, ≥15%, ≥20%, ≥25%, ≥30%, ≥35%, ≥40%, ≥45%, ≥50%, ≥55%, ≥60%, ≥65%, ≥70%, ≥75%, ≥80%, ≥85%, ≥90%, ≥95%, ≥100% (e.g., at least 2-times higher), ≥125%, ≥150%, 10-150%, 20-150%, 30-150%, 40-150%, 50-150%, 60-150%, 70-150%, 80-150%, 90-150%, 100-150%, 125-150%, 10-125%, 20-125%, 30-125%, 40-125%, 50-125%, 60-125%, 70-125%, 80-125%, 90-125%, 100-125%, 10-100%, 20-100%, 30-100%, 40-100%, 50-100%, 60-100%, 70-100%, 80-100%, 90-100%, 10-75%, 20-75%, 30-75%, 40-75%, 50-75%, 60-75%, 10-50%, 20-50%, 30-50%, 40-50%, or 10-25%), as assessed by, e.g., SEC-MALS as described in Example 9; (h) aggregation less than the aggregation observed with a formulation comprising PBS and 0.001% Pluronic F68 (modified PBS formulation) after multiple freeze thaw cycles (e.g., 1, 2, 3, 4, 5, 6, or more freeze thaw cycles), e.g., aggregation less than that observed with the modified PBS formulation after 1, 2, 3, 4, 5, 6, or more freeze thaw cycles by ≥20%, ≥25%, ≥30%, ≥35%, ≥40%, ≥45%, ≥50%, ≥55%, ≥60%, ≥65%, ≥70%, ≥75%, ≥80%, ≥85%, ≥90%, 20-90%, 30-90%, 40-90%, 50-90%, 60-90%, 70-90%, 80-90%, 20-80%, 30-80%, 40-80%, 50-80%, 60-80%, 70-80%, 20-70%, 30-70%, 40-70%, 50-70%, 60-70%, 20-60%, 30-60%, 40-60%, 50-60%, 20-50%, 30-50%, 40-50%, 20-40%, 30-40%, or 20-30%, as assessed by % HMW using size exclusion chromatography (SEC), for example, SEC-FLD/DLS or SEC-MALS, as described in Example 9.

[1969] In some embodiments, 1, 2, 3, 4, 5, 6, 7, or all 8 of the aforementioned properties (a)-(h) are maintained during storage (e.g., storage for 1 day, 2 days, 3 days, 4 days, 5 days, 6 days, 1 week, 2 weeks, 3 weeks, 1 month, 2 months, 3 months, 4 months, 5 months, 6 months, or longer (e.g., one or more years), for example, at −80° C., 2-8° C., room temperature, and/or after multiple freeze thaw cycles (e.g., 1-6 freeze thaw cycles). In some embodiments, values of the 1, 2, 3, 4, 5, 6, 7, or all 8 of the aforementioned properties (a)-(h) do not change by more than 50%, e.g., do not change by more than 45%, 40%, 35%, 30%, 25%, 20%, 15%, 10%, or 5% during storage and/or multiple freeze thaw cycles (e.g., 1, 2, 3, 4, 5, 6, or more freeze thaw cycles) relative to time 0, e.g., the formulation prior to storage and/or freeze thawing.

[1970] In some embodiments, (a) the ratio of VP3 protein to VP2 protein (VP3:VP2) of the AAV capsids of the AAV particle is about 25-35:2, about 25-34:2, about 25-33:2, about 25-32:2, about 25-30:2, about 25:2, about 26:2, about 27:2, about 28:2, about 29:2, about 30:2, about 31:2, about 32:2, about 33:2, about 34:2, or about 35:2, (b) the ratio of VP3 protein to VP1 protein (VP3:VP1) of the AAV capsids of the AAV particle is about 25-35:1 (e.g., 25-34:1, 25-33:1, 25-32:1, 25-30:1, 25:1, 26:1, 27:1, 28:1, 29:1, 30:1, 31:1, 32:1, 33:1, 34:1, or 35:1), and/or (c) the ratio of VP3 protein to VP2 and VP1 proteins (VP3:VP2:VP1) of the AAV capsids of the AAV particle is about 25-35:2:1 (e.g., 25-34:2:1, 25-33:2:1, 25-32:2:1, 25-30:2:1, 25:2:1, 26:2:1, 27:2:1, 28:2:1, 29:2:1, 30:2:1, 31:2:1, 32:2:1, 33:2:1, 34:2:1, or 35:2:1), when the pharmaceutical formulation is stored at −80° C., e.g., for 1 day, 2 days, 3 days, 4 days, 5 days, 6 days, 1 week, 2 weeks, 3 weeks, 1 month, 2 months, 3 months, 4 months, 5 months, 6 months, or longer (e.g., one or more years), e.g., when assessed by capillary gel electrophoresis-sodium dodecyl sulfate (e.g., as described in Example 9).

[1971] In some embodiments, the ratio of VP3 protein to VP2 protein (i.e., VP3:VP2), VP3 protein to VP1 protein (VP3:VP1), or VP3 protein to VP2 and VP1 proteins (VP3:VP2:VP1) of the AAV capsids of the AAV particle does not differ from a reference ratio (e.g., baseline ratio, such as the ratio at time 0) by more than about 25% (e.g., about 20%, about 15%, about 10%, about 5%, about 1%, 1-25%, 1-20%, 1-15%, 1-10%, 1-5%, 5-25%, 5-20%, 5-15%, 5-10%, 10-25%, 10-20%, 10- 15%, 15-25%, 15-20%, or 20-25%) when the pharmaceutical formulation is stored at −80° C., e.g., for 1 day, 2 days, 3 days, 4 days, 5 days, 6 days, 1 week, 2 weeks, 3 weeks, 1 month, 2 months, 3 months, 4 months, 5 months, 6 months, or longer (e.g., one or more years), e.g., when assessed by capillary gel electrophoresis-sodium dodecyl sulfate (e.g., as described in Example 9).

[1972] In some embodiments, the purity of AAV capsids of the AAV particle is at least 95% (e.g., at least 96%, at least 97%, at least 98%, at least 99%, or 100%) when the pharmaceutical formulation is stored at −80° C., e.g., for 1 day, 2 days, 3 days, 4 days, 5 days, 6 days, 1 week, 2 weeks, 3 weeks, 1 month, 2 months, 3 months, 4 months, 5 months, 6 months, or longer (e.g., one or more years), e.g., when assessed by capillary gel electrophoresis-sodium dodecyl sulfate (e.g., as described in Example 9).

[1973] In some embodiments, the purity of AAV capsids of the AAV particle does not differ from a reference value (e.g., baseline value, such as the value at time 0) by more than about 5% (e.g., about 4%, about 3%, about 2%, about 1%) when the pharmaceutical formulation is stored at −80° C., e.g., for 1 day, 2 days, 3 days, 4 days, 5 days, 6 days, 1 week, 2 weeks, 3 weeks, 1 month, 2 months, 3 months, 4 months, 5 months, 6 months, or longer (e.g., one or more years), e.g., when assessed by capillary gel electrophoresis-sodium dodecyl sulfate (e.g., as described in Example 9).

[1974] In some embodiments, (a) the pI value (e.g., central pI value) of the AAV capsids of the AAV particle is in the range of 5.8-6.5 (e.g., 5.8-6.4, 5.8-6.3, 5.8-6.2, 5.8-6.1, 5.9-6.4, 5.9-6.3, 5.9-6.2, 5.9-6.1, 6.0-6.4, 6.0-6.3, 6.0-6.2, 6.0-6.1, 6.1-6.4, 6.1-6.3, 6.1-6.2, 6.2-6.4, 6.2-6.3, 6.2-6.2, or 6.3-6.4) when the pharmaceutical formulation is stored at −80° C., e.g., for 1 day, 2 days, 3 days, 4 days, 5 days, 6 days, 1 week, 2 weeks, 3 weeks, 1 month, 2 months, 3 months, 4 months, 5 months, 6 months, or longer (e.g., one or more years), e.g., when assessed by cIEF (e.g., as described in Example 9), (b) the pI value (e.g., central pI value) of the AAV capsids of the AAV particle does not differ from a reference value (e.g., baseline pI value (e.g., central pI value), such as the pI at time 0) by more than about 10% (e.g., about 9%, about 8%, about 7%, about 6%, about 5%, about 4%, about 3%, about 2%, about 1%, 1-10%, 1-8%, 1-6%, 1-5%, 1-4%, 1-3%, or 1-2%) when the pharmaceutical formulation is stored at −80° C., e.g., for 1 day, 2 days, 3 days, 4 days, 5 days, 6 days, 1 week, 2 weeks, 3 weeks, 1 month, 2 months, 3 months, 4 months, 5 months, 6 months, or longer (e.g., one or more years), e.g., when assessed by cIEF (e.g., as described in Example 9), (c) the pI value (e.g., central pI value) of the AAV capsids of the AAV particle is in the range of 5.9-6.2 (e.g., 5.9-6.0, 5.9-6.1, 6.0-6.1, 6.0-6.2, 6.1-6.2, 5.9, 6.0, 6.1, or 6.2) when the pharmaceutical formulation is stored at 2-8° C., e.g., for 1 day, 2 days, 3 days, 4 days, 5 days, 6 days, 1 week, 2 weeks, 3 weeks, 1 month, 2 months, 3 months, 4 months, 5 months, 6 months, or longer (e.g., one or more years), e.g., when assessed by cIEF (e.g., as described in Example 9), and/or (d) the pI value (e.g., central pI value) of the AAV capsids of the AAV particle does not differ from a reference value (e.g., baseline pI value (e.g., central pI value), such as the pI at time 0) by more than about 10% (e.g., about 9%, about 8%, about 7%, about 6%, about 5%, about 4%, about 3%, about 2%, about 1%, 1-10%, 1-8%, 1-6%, 1-5%, 1-4%, 1-3%, or 1-2%) when the pharmaceutical formulation is stored at 2-8° C., e.g., for 1 day, 2 days, 3 days, 4 days, 5 days, 6 days, 1 week, 2 weeks, 3 weeks, 1 month, 2 months, 3 months, 4 months, 5 months, 6 months, or longer (e.g., one or more years), e.g., when assessed by cIEF (e.g., as described in Example 9).

[1975] In some embodiments, the AAV viral titer is at least 5×10¹² vg/ml (e.g., at least 6×10¹² vg/ml, at least 7×10¹² vg/ml, at least 8×10¹² vg/ml, at least 9×10¹² vg/ml, at least 1×10¹³ vg/ml, at least 2×10¹³ vg/ml, at least 3×10¹³ vg/ml, at least 4×10¹³ vg/ml, at least 5×10¹³ vg/ml, at least 6×10¹³ vg/ml, at least 7×10¹³ vg/ml, at least 8×10¹³ vg/ml, at least 9×10¹³ vg/ml, at least 1×10¹⁴ vg/ml, 5×10¹² vg/ml to 1×10¹⁴ vg/ml, 5×10¹² vg/ml to 5×10¹³ vg/ml, 1×10¹³ vg/ml to 1×10¹⁴ vg/ml, 1×10¹³ vg/ml to 5×10¹³ vg/ml, or 5×10¹² vg/ml to 5×10¹³ vg/ml) when the pharmaceutical formulation is (a) stored at 2-8° C., e.g., for 1 day, 2 days, 3 days, 4 days, 5 days, 6 days, 1 week, 2 weeks, 3 weeks, 1 month, 2 months, 3 months, 4 months, 5 months, 6 months, or longer (e.g., one or more years), (b) stored at −80° C., e.g., for 1 day, 2 days, 3 days, 4 days, 5 days, 6 days, 1 week, 2 weeks, 3 weeks, 1 month, 2 months, 3 months, 4 months, 5 months, 6 months, or longer (e.g., one or more years), (c) stored at 2-8° C., e.g., for 1 day, 2 days, 3 days, 4 days, 5 days, 6 days, 1 week, 2 weeks, 3 weeks, 1 month, 2 months, 3 months, 4 months, 5 months, 6 months, or longer (e.g., one or more years), or (d) subjected to 1-6 freeze thaw cycles (e.g., 1-5, 1-4, 1-3, 1-2, 2-6, 2-5, 2-4, 2-3, 3-6, 3-5, 3-4, 4-6, 4-5, 1, 2, 3, 4, 5, 6 or more freeze thaw cycles), e.g., when assessed by qPCR as described in Example 9.

[1976] In some embodiments, (a) the % high molecular weight (% HMW) aggregates in the pharmaceutical formulation is about 10% or less (e.g., 9%, 8%, 7%, 6%, 5%, 4%, 3%, 2%, 1%, 1-10%, 1-9%, 1-8%, 1-7%, 1-6%, 1-5%, or 1-4%) when the pharmaceutical formulation is stored at −80° C., e.g., for 1 day, 2 days, 3 days, 4 days, 5 days, 6 days, 1 week, 2 weeks, 3 weeks, 1 month, 2 months, 3 months, 4 months, 5 months, 6 months, or longer (e.g., one or more years), e.g., when assessed by size exclusion chromatography (e.g., as described in Example 9), (b) the % HMW aggregates in the pharmaceutical formulation does not differ from a reference value (e.g., baseline % HMW, such as % HMW at time 0) by more than about 30% (e.g., about 25%, about 20%, about 15%, about 10%, or about 5%) when the pharmaceutical formulation is stored at −80° C., e.g., for 1 day, 2 days, 3 days, 4 days, 5 days, 6 days, 1 week, 2 weeks, 3 weeks, 1 month, 2 months, 3 months, 4 months, 5 months, 6 months, or longer (e.g., one or more years), e.g., when assessed by size exclusion chromatography (e.g., as described in Example 9), (c) the % HMW aggregates in the pharmaceutical formulation is about 5% or less (e.g., 4%, 3%, 2%, 1%, 1-5%, 1-4%, or 1-3%) when the pharmaceutical formulation is stored at room temperature, e.g., for 1 day, 2 days, 3 days, 4 days, 5 days, 6 days, 1 week, 2 weeks, 3 weeks, 1 month, 2 months, 3 months, 4 months, 5 months, 6 months, or longer (e.g., one or more years), e.g., when assessed by size exclusion chromatography (e.g., as described in Example 9), (d) the % HMW aggregates in the pharmaceutical formulation does not differ from a reference value (e.g., baseline % HMW, such as % HMW at time 0) by more than about 30% (e.g., about 25%, about 20%, about 15%, about 10%, or about 5%) when the pharmaceutical formulation is stored at room temperature, e.g., for 1 day, 2 days, 3 days, 4 days, 5 days, 6 days, 1 week, 2 weeks, 3 weeks, 1 month, 2 months, 3 months, 4 months, 5 months, 6 months, or longer (e.g., one or more years), e.g., when assessed by size exclusion chromatography (e.g., as described in Example 9), (e) the % HMW aggregates in the pharmaceutical formulation is about 5% or less (e.g., 4%, 3%, 2%, 1%, 1-5%, 1-4%, or 1-3%) when the pharmaceutical formulation is stored at 2-8° C., e.g., for 1 day, 2 days, 3 days, 4 days, 5 days, 6 days, 1 week, 2 weeks, 3 weeks, 1 month, 2 months, 3 months, 4 months, 5 months, 6 months, or longer (e.g., one or more years), e.g., when assessed by size exclusion chromatography (e.g., as described in Example 9), (f) the % HMW aggregates in the pharmaceutical formulation does not differ from a reference value (e.g., baseline % HMW, such as % HMW at time 0) by more than about 30% (e.g., about 25%, about 20%, about 15%, about 10%, or about 5%) when the pharmaceutical formulation is stored at 2-8° C., e.g., for 1 day, 2 days, 3 days, 4 days, 5 days, 6 days, 1 week, 2 weeks, 3 weeks, 1 month, 2 months, 3 months, 4 months, 5 months, 6 months, or longer (e.g., one or more years), e.g., when assessed by size exclusion chromatography (e.g., as described in Example 9), (g) the % HMW aggregates in the pharmaceutical formulation is about 5% or less (e.g., 4%, 3%, 2%, 1%, 1-5%, 1-4%, or 1-3%) when subjected to one or more (e.g., 1-5, 1-4, 1-3, 1-2, 2-6, 2-5, 2-4, 2-3, 3-6, 3-5, 3-4, 4-6, 4-5, 1, 2, 3, 4, 5, 6 or more) freeze thaw cycles (e.g., −80° C. to 25° C. freeze thaw), e.g., when assessed by size exclusion chromatography (e.g., as described in Example 9), and/or (h) the % HMW aggregates in the pharmaceutical formulation does not differ from a reference value (e.g., baseline % HMW, such as % HMW at time 0) by more than about 20% (e.g., about 15%, about 10%, or about 5%) when subjected to one or more (e.g., 1-5, 1-4, 1-3, 1-2, 2-6, 2-5, 2-4, 2-3, 3-6, 3-5, 3-4, 4-6, 4-5, 1, 2, 3, 4, 5, 6 or more) freeze thaw cycles (e.g., −80° C. to 25° C. freeze thaw), e.g., when assessed by size exclusion chromatography (e.g., as described in Example 9).

[1977] In some embodiments, (a) the % full capsids of the AAV particle is at least 45% (e.g., at least 50%, at least 60%, at least 70%, 45-70%, 50-70%, 45-60%, or 45-55%) when the pharmaceutical formulation is stored at −80° C., e.g., for 1 day, 2 days, 3 days, 4 days, 5 days, 6 days, 1 week, 2 weeks, 3 weeks, 1 month, 2 months, 3 months, 4 months, 5 months, 6 months, or longer (e.g., one or more years), e.g., when assessed as described in Example 9, (b) the % full capsids of the AAV particle does not differ from a reference value (e.g., baseline % full capsids at time 0) by more than about 10% (e.g., about 5%, about 3%, about 1%, 1-10%, 1-5%, 1-3%, or 5-10%) when the pharmaceutical formulation is stored at −80° C., e.g., for 1 day, 2 days, 3 days, 4 days, 5 days, 6 days, 1 week, 2 weeks, 3 weeks, 1 month, 2 months, 3 months, 4 months, 5 months, 6 months, or longer (e.g., one or more years), e.g., when assessed as described in Example 9, (c) the % full capsids of the AAV particle is at least 35% (e.g., at least 40%, at least 45%, at least 50%, at least 60%, at least 70%, 35-70%, 35-60%, 35-50%, 35-45%, 40-70%, 40-60% 40-50%, 40-45%, 45-70%, 45-60%, 45-50%, 50-70%, or 50-60%) when the pharmaceutical formulation is stored at 2-8° C., e.g., for 1 day, 2 days, 3 days, 4 days, 5 days, 6 days, 1 week, 2 weeks, 3 weeks, 1 month, 2 months, 3 months, 4 months, 5 months, 6 months, or longer (e.g., one or more years), e.g., when assessed as described in Example 9, (d) the % full capsids of the AAV particle does not differ from a reference value (e.g., baseline % full capsids at time 0) by more than about 25% (e.g., about 20%, about 15%, about 10%, or about 5%) when the pharmaceutical formulation is stored at 2-8° C., e.g., for 1 day, 2 days, 3 days, 4 days, 5 days, 6 days, 1 week, 2 weeks, 3 weeks, 1 month, 2 months, 3 months, 4 months, 5 months, 6 months, or longer (e.g., one or more years), e.g., when assessed as described in Example 9, (e) the % full capsids of the AAV particle is at least 30% (e.g., at at least 35%, least 40%, at least 45%, at least 50%, at least 60%, at least 70%, 30-70%, 30-60%, 30-50%, 30-40%, 35-70%, 35-60%, 35-50%, 35-40%, 40-70%, 40-60% 40-50%, 45-70%, 45-60%, 45-50%, 50-70%, or 50-60%) when the pharmaceutical formulation is stored at room temperature, e.g., for 1 day, 2 days, 3 days, 4 days, 5 days, 6 days, 1 week, 2 weeks, 3 weeks, 1 month, 2 months, 3 months, 4 months, 5 months, 6 months, or longer (e.g., one or more years), e.g., when assessed as described in Example 9, and/or (f) the % full capsids of the AAV particle does not differ from a reference value (e.g., baseline % full capsids at time 0) by more than about 40% (e.g., about 35%, about 30%, about 25%, about 20%, about 15%, about 10%, or about 5%) when the pharmaceutical formulation is stored at room temperature, e.g., for 1 day, 2 days, 3 days, 4 days, 5 days, 6 days, 1 week, 2 weeks, 3 weeks, 1 month, 2 months, 3 months, 4 months, 5 months, 6 months, or longer (e.g., one or more years), e.g., when assessed as described in Example 9.

[1978] In some embodiments, a formulation described herein is stored at a high concentration and/or a high osmolarity. In some embodiments, the formulation for storage comprises 3-7.5% glycerol. In some embodiments, the formulation is diluted prior to use, e.g., diluted sufficiently to achieve a concentration of glycerol in the formulation of about 5.95%.

[1979] In some embodiments, the concentration of the polyether is adjusted to achieve an osmolality (mOsm/kg) within the range of 250-550. In some embodiments, the formulation comprises glycerol (or equivalent) in a concentration that results in an osmolality within the range of 250-550, for example, 250-350, 250-400, 300-400, 350-450, or 450-550 mOsm/kg. In some embodiments, the formulation comprises glycerol at a concentration of 0.75-1.25% or 2.25-2.75%. In some embodiments, the formulation comprises glycerol at a concentration of 1% or about 1%. In some embodiments, the formulation comprises glycerol at a concentration of 2.5% or about 2.5%. In some embodiments, glycerol can be replaced by an amount of glycerin or PEG (e.g., PEG with a molecular weight ≤300) sufficient to achieve an osmolality within the desired range (e.g., between 250-550).

[1980] In some embodiments, the concentration of the sugar is adjusted to achieve an osmolality (mOsm/kg) within the range of 250-550. In some embodiments, the formulation comprises trehalose (or equivalent) in a concentration that results in an osmolality within the range of 250-550, for example, 250-350, 250-400, 300-400, 350-450, or 450-550 mOsm/kg. In some embodiments, the formulation comprises trehalose at a concentration of 5.8-6.2%. In some embodiments, the formulation comprises trehalose at a concentration of 5.95% or about 5.95%. In some embodiments, trehalose can be replaced by an amount of a different sugar sufficient to achieve an osmolality within the desired range.

[1981] In some embodiments, the formulation comprises (a) an AAV particle or variant thereof described herein, e.g., an AAV particle comprising an AAV capsid variant described herein, (b) Tris, (c) glycerol, (d) sodium chloride, and (e) a poloxamer.

[1982] In some embodiments, the formulation comprises (a) an AAV particle or variant thereof described herein, e.g., an AAV particle comprising an AAV capsid variant described herein, (b) 10-30 mM Tris, (c) 0.5-1.5% glycerol, (d) 55-70 mM sodium chloride, and (e) 0.0005-0.0015% Pluronic F68. In some embodiments, the formulation comprises (a) an AAV particle or variant thereof described herein, e.g., an AAV particle comprising an AAV capsid variant described herein, (b) 15-25 mM Tris, (c) 0.8%-1.2% glycerol, (d) 60-65 mM sodium chloride, and (e) 0.0008-0.0012% Pluronic F68. In some embodiments, the formulation comprises (a) an AAV particle or variant thereof described herein, e.g., an AAV particle comprising an AAV capsid variant described herein, (b) about 20 mM Tris, (c) about 1.0% glycerol, (d) about 62.5 mM sodium chloride, and (e) about 0.001% Pluronic F68. In some embodiments, the formulation comprises (a) an AAV particle or variant thereof described herein, e.g., an AAV particle comprising an AAV capsid variant described herein, (b) 20 mM Tris, (c) 1.0% glycerol, (d) 62.5 mM sodium chloride, and (e) 0.001% Pluronic F68. In some embodiments, the formulation has a pH in the range of 7.8-8.5, for example, 8.0-8.3. In some embodiments, the formulation has a pH of 8.0, 8.1, 8.2, 8.3, 8.4, or 8.5, or a pH of about 8.0, 8.1, 8.2, 8.3, 8.4, or 8.5. In some embodiments, the formulation has an osmolality (mOsm/kg) in the range of 250-500 (e.g., 250-400 or 250-350).

[1983] In some embodiments, the formulation comprises (a) an AAV particle or variant thereof described herein, e.g., an AAV particle comprising an AAV capsid variant described herein, (b) 10-30 mM Tris, (c) 2.0-3.0% glycerol, (d) 55-70 mM sodium chloride, and (e) 0.0005-0.0015% Pluronic F68. In some embodiments, the formulation comprises (a) an AAV particle or variant thereof described herein, e.g., an AAV particle comprising an AAV capsid variant described herein, (b) 15-25 mM Tris, (c) 2.3%-2.7% glycerol, (d) 60-65 mM sodium chloride, and (e) 0.0008-0.0012% Pluronic F68. In some embodiments, the formulation comprises (a) an AAV particle or variant thereof described herein, e.g., an AAV particle comprising an AAV capsid variant described herein, (b) about 20 mM Tris, (c) about 2.5% glycerol, (d) about 62.5 mM sodium chloride, and (e) about 0.001% Pluronic F68. In some embodiments, the formulation comprises (a) an AAV particle or variant thereof described herein, e.g., an AAV particle comprising an AAV capsid variant described herein, (b) 20 mM Tris, (c) 2.5% glycerol, (d) 62.5 mM sodium chloride, and (e) 0.001% Pluronic F68. In some embodiments, the formulation has a pH in the range of 7.8-8.5, for example, 8.0-8.3. In some embodiments, the formulation has a pH of 8.0, 8.1, 8.2, 8.3, 8.4, or 8.5, or a pH of about 8.0, 8.1, 8.2, 8.3, 8.4, or 8.5. In some embodiments, the formulation has an osmolality (mOsm/kg) in the range of 400-650 (e.g., 450-600 or 450-550).

[1984] In some embodiments, the formulation comprises (a) an AAV particle or variant thereof described herein, e.g., an AAV particle comprising an AAV capsid variant described herein, (b) 10-30 mM Tris, (c) 5.5-6.5% trehalose, (d) 55-70 mM sodium chloride, and (e) 0.0005-0.0015% Pluronic F68. In some embodiments, the formulation comprises (a) an AAV particle or variant thereof described herein, e.g., an AAV particle comprising an AAV capsid variant described herein, (b) 15-25 mM Tris, (c) 5.8-6.2% trehalose, (d) 60-65 mM sodium chloride, and (e) 0.0008-0.0012% Pluronic F68. In some embodiments, the formulation comprises (a) an AAV particle or variant thereof described herein, e.g., an AAV particle comprising an AAV capsid variant described herein, (b) about 20 mM Tris, (c) about 5.95% trehalose, (d) about 62.5 mM sodium chloride, and (e) about 0.001% Pluronic F68. In some embodiments, the formulation comprises (a) an AAV particle or variant thereof described herein, e.g., an AAV particle comprising an AAV capsid variant described herein, (b) 20 mM Tris, (c) 5.95% trehalose, (d) 62.5 mM sodium chloride, and (e) 0.001% Pluronic F68. In some embodiments, the formulation has a pH in the range of 7.8-8.5, for example, 8.0-8.3. In some embodiments, the formulation has a pH of 8.0, 8.1, 8.2, 8.3, 8.4, or 8.5, or a pH of about 8.0, 8.1, 8.2, 8.3, 8.4, or 8.5. In some embodiments, the formulation has an osmolality (mOsm/kg) in the range of 250-500 (e.g., 250-400 or 250-350).

[1985] In some embodiments, components of the aforementioned formulations are replaced with an equivalent component which does not substantially affect the properties of the formulation (e.g., 1, 2, 3, 4, or all 5 of the aforementioned properties (a)-(e)) under various storage conditions, e.g., as described in Example 9. For example, in some embodiments, Tris is replaced with a different buffering agent, e.g., Bis-tris propane (BTP) or a PBS-based buffering agent (e.g., PBS). In some embodiments, sodium chloride is replaced with a different salt, e.g., potassium chloride. In some embodiments, glycerol is replaced with a different polyether, e.g., glycerin or PEG (e.g., PEG with a molecular weight ≤300). In some embodiments, Pluronic F68 is replaced with another ethylene oxide/propylene oxide copolymer (e.g., Pluronic F127). Whether or not the replaced component has an impact on the properties (e.g., pH, osmolality, AAV titer, occupancy, aggregation) of the formulation can be tested using the assays and methods described herein, e.g., in Example 9.

[1986] The formulations described herein comprise an AAV particle or variant thereof described herein, e.g., an AAV particle comprising an AAV capsid variant described herein (e.g., an AAV9 capsid variant). In some embodiments, the formulations comprise an AAV particle comprising the AAV capsid variant of any one of TTD-001, TTD-002, TTD-003, TTD-004, TTD-005, TTD-006, TTD-007, TTD-008, TTD-009, TTD-010, TTD-011, TTD-012, TTD-013, or TTD-014, e.g., as provided in Tables 3 and 4. In some embodiments, the formulation comprises an AAV capsid variant comprising an amino acid sequence in any one of Tables 1A, 1B, 2-7, 10-11, or 20, or a variant thereof. In some embodiments, the formulation comprises an AAV capsid variant comprising the amino acid sequence of any one of SEQ ID NOs: 5, 8, 3636-3647, or a sequence with at least 70% (e.g., at least about 75, 80, 85, 90, 95, 96, 97, 98, or 99%) sequence identity thereto; an amino acid sequence comprising at least one, two or three modifications, but not more than 30, 20 or 10 modifications relative to the amino acid sequence of any one of SEQ ID NOs: 5, 8, 3636-3647; or an amino acid sequence comprising at least one, two or three, but not more than 30, 20 or 10 different amino acids relative to the amino acid sequence of any one of SEQ ID NOs: 5, 8, 3636-3647.

[1987] In some embodiments, a formulation described herein comprises an AAV particle comprising an AAV capsid variant comprising the amino acid sequence of SEQ ID NO: 3636, or a sequence with at least 70% (e.g., at least about 75, 80, 85, 90, 95, 96, 97, 98, or 99%) sequence identity thereto; an amino acid sequence comprising at least one, two or three modifications, but not more than 30, 20 or 10 modifications relative to the amino acid sequence of SEQ ID NO: 3636; or an amino acid sequence comprising at least one, two or three, but not more than 30, 20 or 10 different amino acids relative to the amino acid sequence of SEQ ID NOs: 3636.

[1988] In some embodiments, a formulation described herein comprises an AAV particle comprising an AAV capsid variant comprising the amino acid sequence of SEQ ID NO: 5, or a sequence with at least 70% (e.g., at least about 75, 80, 85, 90, 95, 96, 97, 98, or 99%) sequence identity thereto; an amino acid sequence comprising at least one, two or three modifications, but not more than 30, 20 or 10 modifications relative to the amino acid sequence of SEQ ID NO: 5; or an amino acid sequence comprising at least one, two or three, but not more than 30, 20 or 10 different amino acids relative to the amino acid sequence of SEQ ID NOs: 5.

[1989] In some embodiments, a formulation described herein comprises an AAV particle comprising an AAV capsid variant comprising the amino acid sequence of SEQ ID NO: 8, or a sequence with at least 70% (e.g., at least about 75, 80, 85, 90, 95, 96, 97, 98, or 99%) sequence identity thereto; an amino acid sequence comprising at least one, two or three modifications, but not more than 30, 20 or 10 modifications relative to the amino acid sequence of SEQ ID NO: 8; or an amino acid sequence comprising at least one, two or three, but not more than 30, 20 or 10 different amino acids relative to the amino acid sequence of SEQ ID NOs: 8.

[1990] In some embodiments, a formulation described herein, e.g., comprising an AAV particle or variant thereof comprising an AAV capsid variant described herein, is administered to a subject (e.g., a human) intravenously. In some embodiments, the formulation to be administered intravenously is an isotonic solution (e.g., a solution comprising an osmolarity of 270-310 mOsm/L). In some embodiments, the formulation to be administered intravenously is a solution comprising an osmolarity above 310 mOsm/L. In some embodiments, the formulation is administered in a high volume (e.g., a volume greater than 100 mL). In some embodiments, the formulation to be administered (e.g., intravenously) in a high volume (e.g., a volume greater than 100 mL) comprises a concentration of about 0.5-3% (e.g., about 1-2%) glycerol and/or an osmolarity of about 270-310 mOsm/L. In some embodiments, a high volume comprises a volume above 100 mL. In some embodiments, the formulation is administered in a low volume (e.g., a volume of 100 mL or a volume lower than 100 mL). In some embodiments, the formulation to be administered (e.g., intravenously) in a low volume (e.g., a volume of 100 mL or a volume lower than 100 mL) comprises a concentration of about 3-5% glycerol and/or an osmolarity above 310 mOsm/L. In some embodiments a low volume comprises 100 mL. In some embodiments, a low volume comprises no more than 100 mL.

### Administration

[1991] In some embodiments, an AAV particle disclosed herein (e.g., an AAV particle comprising an AAV capsid variant) may be administered by a to a subject by a delivery route, e.g., a localized delivery route or a systemic delivery route.

[1992] In some embodiments, an AAV particle described herein (e.g., an AAV particle comprising an AAV capsid variant) may be administered via such a route that it is able to cross the blood-brain barrier, vascular barrier, or other epithelial barrier. In some embodiments, an AAV particle of the present disclosure (e.g., an AAV particle comprising an AAV capsid variant) may be administered in any suitable form, either as a liquid solution or suspension, as a solid form suitable for liquid solution or suspension in a liquid solution. In some embodiments, an AAV particle (e.g., an AAV particle comprising an AAV capsid variant) may be formulated with any appropriate and pharmaceutically acceptable excipient.

[1993] In some embodiments, the AAV particle described herein (e.g., an AAV particle comprising an AAV capsid variant) is administered intramuscularly, intravenously, intracerebrally, intrathecally, intracerebroventricularly, via intraparenchymal administration, or via intra-cisterna magna injection (ICM).

[1994] In some embodiments, an AAV particle of the present disclosure (e.g., an AAV particle comprising an AAV capsid variant) may be delivered to a subject via a single route administration. In some embodiments, an AAV particle of the present disclosure may be delivered to a subject via a multi-site route of administration. In some embodiments, a subject may be administered at 2, 3, 4, 5, or more than 5 sites.

[1995] In some embodiments, an AAV particle of the present disclosure (e.g., an AAV particle comprising an AAV capsid variant) is administered via a bolus infusion. In some embodiments, an AAV particle of the present disclosure is administered via sustained delivery over a period of minutes, hours, or days. In some embodiments, the infusion rate may be changed depending on the subject, distribution, formulation, and/or another delivery parameter. In some embodiments, an AAV particle of the present disclosure is administered using a controlled release. In some embodiments, an AAV particle of the present disclosure is administered using a sustained release, e.g., a release profile that conforms to a release rate over a specific period of time.

[1996] In some embodiments, an AAV particle (e.g., an AAV particle comprising an AAV capsid variant) may be delivered by more than one route of administration. As non-limiting examples of combination administrations, an AAV particle may be delivered by intrathecal and intracerebroventricular, or by intravenous and intraparenchymal administration.

### Intravenous Administration

[1997] In some embodiments, an AAV particle described herein (e.g., an AAV particle comprising an AAV capsid polypeptide, e.g., an AAV capsid variant) may be administered to a subject by systemic administration. In some embodiments, the systemic administration is intravenous administration. In another embodiment, the systemic administration is intraarterial administration. In some embodiments, an AAV particle of the present disclosure may be administered to a subject by intravenous administration. In some embodiments, the intravenous administration may be achieved by subcutaneous delivery. In some embodiments, the AAV particle is administered to the subject via focused ultrasound (FUS), e.g., coupled with the intravenous administration of microbubbles (FUS-MB) or MRI-guided FUS coupled with intravenous administration, e.g., as described in Terstappen et al. (Nat Rev Drug Discovery, doi.org/10.1038/s41573-021-00139-y (2021)), the contents of which are incorporated herein by reference in its entirety. In some embodiments, the AAV particle is administered to the subject intravenously. In some embodiments, the subject is a human.

### Administration to the CNS

[1998] In some embodiments, an AAV particle described herein (e.g., an AAV particle comprising an AAV capsid variant) may be delivered by direct injection into the brain. As a non-limiting example, the brain delivery may be by intrahippocampal administration. In some embodiments, an AAV particle of the present disclosure may be administered to a subject by intraparenchymal administration. In some embodiments, the intraparenchymal administration is to tissue of the central nervous system. In some embodiments, an AAV particle of the present disclosure may be administered to a subject by intracranial delivery (See, e.g., U.S. Pat. No. 8,119,611; the content of which is incorporated herein by reference in its entirety). In some embodiments, an AAV particle described herein may be delivered by injection into the CSF pathway. Non-limiting examples of delivery to the CSF pathway include intrathecal and intracerebroventricular administration. In some embodiments, an AAV particle described herein may be administered via intracisternal magna (ICM) injection.

[1999] In some embodiments, an AAV particle of the present disclosure (e.g., an AAV particle comprising an AAV capsid variant) may be delivered to the brain by systemic delivery. As a non-limiting example, the systemic delivery may be by intravascular administration. As a non-limiting example, the systemic or intravascular administration may be intravenous.

[2000] In some embodiments, an AAV particle (e.g., an AAV particle comprising an AAV capsid variant) of the present disclosure may be delivered by an intraocular delivery route. A non-limiting example of an intraocular administration includes an intravitreal injection.

### Intramuscular Administration

[2001] In some embodiments, an AAV particle described herein (e.g., an AAV particle comprising an AAV capsid variant) may be delivered by intramuscular administration. Without wishing to be bound by theory, it is believed in some embodiments, that the multi-nucleated nature of muscle cells provides an advantage to gene transduction subsequent to AAV delivery. In some embodiments, cells of the muscle are capable of expressing recombinant proteins with the appropriate post-translational modifications. Without wishing to be bound by theory, it is believed in some embodiments, the enrichment of muscle tissue with vascular structures allows for transfer to the blood stream and whole-body delivery. Examples of intramuscular administration include systemic (e.g., intravenous), subcutaneous or directly into the muscle. In some embodiments, more than one injection is administered. In some embodiments, an AAV particle of the present disclosure may be delivered by an intramuscular delivery route. (See, e.g., U.S. Pat. No. 6,506,379; the content of which is incorporated herein by reference in its entirety). Non-limiting examples of intramuscular administration include an intravenous injection or a subcutaneous injection.

[2002] In some embodiments, an AAV particle of the present disclosure (e.g., an AAV particle comprising an AAV capsid variant) is administered to a subject and transduces the muscle of a subject. As a non-limiting example, an AAV particle is administered by intramuscular administration. In some embodiments, an AAV particle of the present disclosure may be administered to a subject by subcutaneous administration. In some embodiments, the intramuscular administration is via systemic delivery. In some embodiments, the intramuscular administration is via intravenous delivery. In some embodiments, the intramuscular administration is via direct injection to the muscle.

[2003] In some embodiments, the muscle is transduced by administration, e.g., intramuscular administration. In some embodiments, an intramuscular delivery comprises administration at one site. In some embodiments, an intramuscular delivery comprises administration at more than one site. In some embodiments, an intramuscular delivery comprises administration at two, three, four, or more sites. In some embodiments, intramuscular delivery is combined with at least one other method of administration.

[2004] In some embodiments, an AAV particle pf the present disclosure (e.g., an AAV particle comprising an AAV capsid variant) may be administered to a subject by peripheral injections. Non-limiting examples of peripheral injections include intraperitoneal, intramuscular, intravenous, conjunctival, or joint injection. It was disclosed in the art that the peripheral administration of AAV vectors can be transported to the central nervous system, for example, to the motor neurons (e.g., U. S. Patent Publication Nos. US20100240739 and US20100130594; the content of each of which is incorporated herein by reference in their entirety).

[2005] In some embodiments, an AAV particle of the present disclosure (e.g., an AAV particle comprising an AAV capsid variant) may be administered to a subject by intraparenchymal administration. In some embodiments, the intraparenchymal administration is to muscle tissue. In some embodiments, an AAV particle of the present disclosure is delivered as described in Bright et al 2015 (Neurobiol Aging. 36(2):693-709), the contents of which are herein incorporated by reference in their entirety. In some embodiments, an AAV particle of the present disclosure is administered to the gastrocnemius muscle of a subject. In some embodiments, an AAV particle of the present disclosure is administered to the bicep femorii of the subject. In some embodiments, an AAV particles of the present disclosure is administered to the tibialis anterior muscles. In some embodiments, an AAV particle of the present disclosure is administered to the soleus muscle.

### Depot Administration

[2006] As described herein, in some embodiments, a pharmaceutical composition and/or an AAV particle of the present disclosure (e.g., an AAV particle comprising an AAV capsid polypeptide, e.g., an AAV capsid variant) are formulated in depots for extended release. Generally, specific organs or tissues are targeted for administration.

[2007] In some embodiments, a pharmaceutical composition and/or an AAV particle of the present disclosure (e.g., an AAV particle comprising an AAV capsid polypeptide, e.g., an AAV capsid variant) are spatially retained within or proximal to target tissues. Provided are methods of providing a pharmaceutical composition, an AAV particle, to target tissues of mammalian subjects by contacting target tissues (which comprise one or more target cells) with the pharmaceutical composition and/or the AAV particle, under conditions such that they are substantially retained in target tissues, e.g., such that at least 10, 20, 30, 40, 50, 60, 70, 80, 85, 90, 95, 96, 97, 98, 99, 99.9, 99.99 or greater than 99.99% of the composition is retained in the target tissues. In some embodiments, retention is determined by measuring the amount of pharmaceutical composition and/or AAV particle, that enter a target cell or a plurality of target cells. For example, at least 1%, 5%, 10%, 20%, 30%, 40%, 50%, 60%, 70%, 80%, 85%, 90%, 95%, 96%, 97%, 98%, 99%, 99.9%, 99.99%, or greater than 99.99% of a pharmaceutical composition and/or an AAV particle, administered to a subject are present intracellularly at a period of time following administration. For example, intramuscular injection to a subject may be performed using aqueous compositions comprising a pharmaceutical composition and/or an AAV particle of the present disclosure and a transfection reagent, and retention is determined by measuring the amount of the pharmaceutical composition and/or the AAV particle, present in the muscle cell or plurality of muscle cells.

[2008] In some embodiments, disclosed herein are methods of providing a pharmaceutical composition and/or an AAV particle of the present disclosure (e.g., an AAV particle comprising an AAV capsid polypeptide, e.g., an AAV capsid variant) to a tissue of a subject, by contacting the tissue (comprising a cell, e.g., a plurality of cells) with the pharmaceutical composition and/or the AAV particle under conditions such that they are substantially retained in the tissue. In some embodiments, a pharmaceutical composition and/or AAV particle described herein comprise a sufficient amount of an active ingredient such that the effect of interest is produced in at least one cell. In some embodiments, a pharmaceutical composition and/or an AAV particle generally comprise one or more cell penetration agents. In some embodiments, the disclosure provides a naked formulations (such as without cell penetration agents or other agents), with or without pharmaceutically acceptable carriers.

### Methods of Treatment

[2009] Provided in the present disclosure are methods for introducing (e.g., delivering) an AAV particle of the present disclosure (e.g., an AAV particle comprising an AAV capsid variant) into cells. In some embodiments, the method comprises introducing into said cells an AAV particle or vector described herein in an amount sufficient to modulate, e.g., increase, the production of a target gene, mRNA, and/or protein. In some embodiments, the method comprises introducing into said cells an AAV particle or vector described herein in an amount sufficient to modulate, e.g., decrease, expression of a target gene, mRNA, and/or protein. In some aspects, the cells may be neurons such as but not limited to, motor, hippocampal, entorhinal, thalamic, cortical, sensory, sympathetic, or parasympathetic neurons, and glial cells such as astrocytes, microglia, and/or oligodendrocytes. In other aspects, the cells may be a muscle cell, e.g., a cell of a diaphragm, a quadriceps, or a heart (e.g., a heart atrium or a heart ventricle).

[2010] Disclosed in the present disclosure are methods for treating a neurological disease/disorder or a neurodegenerative disorder, a muscular or neuromuscular disorder, or a neurooncological disorder associated with aberrant, e.g., insufficient or increased, function/presence of a protein, e.g., a target protein in a subject in need of treatment.

[2011] In some embodiments, the method comprises administering to the subject a therapeutically effective amount of a composition comprising AAV particles of the present disclosure. As a non-limiting example, the AAV particles can increase target gene expression, increase target protein production, and thus reduce one or more symptoms of neurological disease in the subject such that the subject is therapeutically treated.

[2012] In other embodiments, the method comprises administering to the subject a therapeutically effective amount of a composition comprising AAV particles (e.g., an AAV particle comprising an AAV capsid polypeptide, e.g., an AAV capsid variant) comprising a viral genome with a nucleic acid sequence encoding one or more siRNA molecules. As a non-limiting example, the siRNA molecules can silence target gene expression, inhibit target protein production, and reduce one or more symptoms of neurological disease in the subject such that the subject is therapeutically treated.

[2013] In some embodiments, the composition comprising the AAV particles of the present disclosure (e.g., an AAV particle comprising an AAV capsid variant described herein) is administered to the central nervous system of the subject via systemic administration. In some embodiments, the systemic administration is intravenous (IV) injection. In some embodiments, the AAV particle described herein or a pharmaceutical composition comprising an AAV particle described herein is administered by focused ultrasound (FUS), e.g., coupled with the intravenous administration of microbubbles (FUS-MB) or MRI-guided FUS coupled with intravenous administration. In some embodiments, a composition comprising an AAV particle described herein is administered intravenously. In some embodiments, the AAV particle is administered at a dose of about 6.7e11 VG/kg to 2e13 VG/kg (e.g., 6.7e11 VG/kg, 2e12 VG/kg, 6.7e12 VG/kg, or 2e13 VG/kg) or about 5e11 VG/kg to 3e13 VG/kg. In some embodiments, the AAV particle is administered at a dose of about 6.7e10 VG/kg to 6.7e12 VG/kg, about 1.3e11 VG/kg to 3.4e12 VG/kg, or about 2.2e11 VG/kg to 2e12 VG/kg. In some embodiments, the AAV particle is administered at a dose of about 4e11 VG/kg to 8e11 VG/kg (e.g., about 6.7e11 VG/kg). In some embodiments, the AAV particle is administered at a dose of about 6.7e11 VG/kg. In some embodiments, the AAV particle is administered at a dose of about 2e11 VG/kg to 2e13 VG/kg, about 4e11 VG/kg to 1e13 VG/kg, about 6.7e11 VG/kg to about 6e12 VG/kg. In some embodiments, the AAV particle is administered at a dose of about 1e12 VG/kg to 5e12 VG/kg (e.g., about 2e12 VG/kg). In some embodiments, the AAV particle is administered at a dose of about 2e12 VG/kg. In some embodiments, the AAV particle is administered at a dose of about 6.7e11 VG/kg to 6.7e13 VG/kg, about 1.3e12 VG/kg to 3.4e13 VG/kg, or about 2.2e12 VG/kg to 2e13 VG/kg. In some embodiments, the AAV particle is administered at a dose of about 4e12 VG/kg to 8e12 VG/kg (e.g., 6.7e12 VG/kg). In some embodiments, the AAV particle is administered at a dose of about 6.7e12 VG/kg. In some embodiments, the AAV particle is administered at a dose of about 2e12 VG/kg to 2e14 VG/kg, about 4e12 VG/kg to 1e14 VG/kg, about 6.7e12 VG/kg to about 6e13 VG/kg. In some embodiments, the AAV particle is administered at a dose of about 1e13 VG/kg to 5e13 VG/kg (e.g., 2e13 VG/kg). In some embodiments, the AAV particle is administered at a dose of about 2e13 VG/kg. In some embodiments, the AAV particle comprises a viral genome which is single stranded.

[2014] In some embodiments, administration of the AAV particle at a dose of 2e13 VG/kg is capable of transducing greater than 40% of total cells in brain region chosen from a thalamus, caudate, or putamen, and greater than 20% total cells in a brain region chosen from a entorhinal cortex, auditory cortex, or hippocampus. In some embodiments, administration of the AAV particle at a dose of 6.7e12 VG/kg is capable of transducing greater than 20% of total cells in brain region chosen from a thalamus, caudate, putamen, or cerebellum. In some embodiments, administration of the AAV particle at a dose of 2e13 VG/kg is capable of transducing greater than 90% SMI311-positive neurons in the thalamus, dentate and spinal cord. In some embodiments, administration of the AAV particle at a dose of 2e12 VG/kg is capable of expressing transgene mRNA at a supraphysiological level. In some embodiments, administration of the AAV particle at a dose of 2e12 VG/kg is capable of transducing multiple regions of the central nervous system (e.g., one or more regions of the brain and/or spinal cord).

[2015] In some embodiments, the composition comprising the AAV particle of the present disclosure (e.g., an AAV particle comprising an AAV capsid variant) is administered to the central nervous system of the subject via intraventricular administration. In some embodiments, the composition comprising the AAV particle of the present disclosure (e.g., an AAV particle comprising an AAV capsid variant) is administered via intra-cisterna magna injection (ICM).

[2016] In some embodiments, the composition comprising an AAV particle of the present disclosure (e.g., an AAV particle comprising an AAV capsid variant) is administered to the central nervous system of the subject via intraventricular injection and intravenous injection.

[2017] In some embodiments, the composition comprising the AAV particle of the present disclosure (e.g., an AAV particle comprising an AAV capsid variant) is administered to the central nervous system of the subject via ICM injection and intravenous injection at a specific dose per subject. As a non-limiting example, the AAV particles are administered via ICM injection at a dose of 1×10⁴ VG per subject. As a non-limiting example, the AAV particles are administered via IV injection at a dose of 2×10¹³ VG per subject.

[2018] In some embodiments, the composition comprising the AAV particle of the present disclosure (e.g., an AAV particle comprising an AAV capsid variant) is administered to the central nervous system of the subject. In other embodiments, the composition comprising the AAV particles of the present disclosure is administered to a CNS tissue of a subject (e.g., putamen, hippocampus, thalamus, or cortex of the subject).

[2019] In some embodiments, the composition comprising the AAV particle of the present disclosure (e.g., an AAV particle comprising an AAV capsid variant) is administered to the central nervous system of the subject via intraparenchymal injection. Non-limiting examples of intraparenchymal injections include intraputamenal, intracortical, intrathalamic, intrastriatal, intrahippocampal or into the entorhinal cortex.

[2020] In some embodiments, the composition comprising the AAV particle of the present disclosure (e.g., an AAV particle comprising an AAV capsid variant) is administered to the central nervous system of the subject via intraparenchymal injection and intravenous injection.

[2021] In some embodiments, the composition comprising the AAV particle of the present disclosure (e.g., an AAV particle comprising an AAV capsid variant) is administered to the central nervous system of the subject via intraventricular injection, intraparenchymal injection and intravenous injection.

[2022] In some embodiments, the composition comprising an AAV particle (e.g., an AAV particle comprising an AAV capsid variant) of a plurality of particles of the present disclosure is administered to a muscle of the subject via intravenous injection. In some embodiments, the composition comprising an AAV particle of a plurality of particles of the present disclosure is administered to a muscle of the subject via intramuscular injection.

[2023] In some embodiments, an AAV particle of the present disclosure (e.g., an AAV particle comprising an AAV capsid variant) may be delivered into specific types of cells, including, but not limited to, thalamic, hippocampal, entorhinal, cortical, motor, sensory, excitatory, inhibitory, sympathetic, or parasympathetic neurons; glial cells including oligodendrocytes, astrocytes and microglia; and/or other cells surrounding neurons such as T cells. In some embodiments, an AAV particle of the present disclosure may be delivered into a muscle cell, e.g., a cell of the quadriceps, diaphragm, liver, and/or heart (e.g., heart atrium or heart ventricle).

[2024] In some embodiments, an AAV particle (e.g., an AAV particle comprising an AAV capsid polypeptide, e.g., an AAV capsid variant), e.g., a plurality of particles, of the present disclosure may be delivered to a cell or region of the midbrain. In some embodiments, an AAV particle (e.g., an AAV particle comprising an AAV capsid polypeptide, e.g., an AAV capsid variant), e.g., a plurality of particles, of the present disclosure may be delivered to a cell or region of the brains stem.

[2025] In some embodiments, an AAV particle (e.g., an AAV particle comprising an AAV capsid polypeptide, e.g., an AAV capsid variant), e.g., a plurality of particles, of the present disclosure may be delivered to neurons in the putamen, hippocampus, thalamus and/or cortex.

[2026] In some embodiments, an AAV particle (e.g., an AAV particle comprising an AAV capsid variant), e.g., a plurality of particles, of the present disclosure may be used as a therapy for a genetic disorder, e.g., an autosomal dominant genetic disorder, an autosomal recessive disorder, X-linked dominant genetic disorder, an X-linked recessive genetic disorder, or a Y-linked genetic disorder. In some embodiments, the genetic disorder is a monogenetic disorder or a polygenic disorder. In some embodiments, treatment of a genetic disorder, e.g., a monogenic disorder, comprises the use of an AAV particle described herein (e.g., an AAV particle comprising an AAV capsid variant described herein) for a gene replacement therapy.

[2027] In some embodiments, an AAV particle (e.g., an AAV particle comprising an AAV capsid variant), e.g., a plurality of particles, of the present disclosure may be used as a therapy for a neurological disease.

[2028] In some embodiments, an AAV particle (e.g., an AAV particle comprising an AAV capsid variant), e.g., a plurality of particles, of the present disclosure may be used as a therapy for tauopathies.

[2029] In some embodiments, an AAV particle (e.g., an AAV particle comprising an AAV capsid variant), e.g., a plurality of particles, of the present disclosure may be used as a therapy for Alzheimer's Disease.

[2030] In some embodiments, an AAV particle (e.g., an AAV particle comprising an AAV capsid variant), e.g., a plurality of particles, of the present disclosure may be used as a therapy for Amyotrophic Lateral Sclerosis.

[2031] In some embodiments, an AAV particle (e.g., an AAV particle comprising an AAV capsid variant), e.g., a plurality of particles, of the present disclosure may be used as a therapy for Huntington's Disease.

[2032] In some embodiments, an AAV particle (e.g., an AAV particle comprising an AAV capsid variant), e.g., a plurality of particles, of the present disclosure may be used as a therapy for Parkinson's Disease.

[2033] In some embodiments, an AAV particle (e.g., an AAV particle comprising an AAV capsid variant), e.g., a plurality of particles, of the present disclosure may be used as a therapy for Gaucher disease (GD) (e.g., Type 1 GD, Type 2 GD, or Type 3 GD). In some embodiments, an AAV particle (e.g., an AAV particle comprising an AAV capsid variant), e.g., a plurality of particles, of the present disclosure may be used as a therapy for Parkinson's disease associated with a GBA mutation. In some embodiments, an AAV particle (e.g., an AAV particle comprising an AAV capsid variant), e.g., a plurality of particles, of the present disclosure may be used as a therapy for dementia with Lewy Bodies (DLB).

[2034] In some embodiments, an AAV particle (e.g., an AAV particle comprising an AAV capsid variant), e.g., a plurality of particles, of the present disclosure may be used as a therapy for spinal muscular atrophy.

[2035] In some embodiments, an AAV particle (e.g., an AAV particle comprising an AAV capsid variant), e.g., a plurality of particles, of the present disclosure may be used as a therapy for a leukodystrophy, e.g., Alexander disease, autosomal dominant leukodystrophy with autonomic diseases (ADLD), Canavan disease, cerebrotendinous xanthomatosis (CTX), metachromatic leukodystrophy (MLD), Pelizaeus-Merzbacher disease, or Refsum disease.

[2036] In some embodiments, an AAV particle (e.g., an AAV particle comprising an AAV capsid variant), e.g., a plurality of particles, of the present disclosure may be used as a therapy for Friedreich's Ataxia.

[2037] In some embodiments, an AAV particle (e.g., an AAV particle comprising an AAV capsid variant), e.g., a plurality of particles, of the present disclosure may be used as a therapy for chronic or neuropathic pain.

[2038] In some embodiments, an AAV particle (e.g., an AAV particle comprising an AAV capsid variant), e.g., a plurality of particles, of the present disclosure may be used as a therapy for a disease associated with expression of HER2, e.g., a disease associated with overexpression of HER2. In some embodiments, the AAV particle of the disclosure (e.g., an AAV particle comprising an AAV capsid variant) is useful for the treatment, prophylaxis, palliation or amelioration of a HER2-positive cancer. In some embodiments, the HER2-positive cancer is a HER2-positive solid tumor. Additionally, or alternatively, the HER2-positive cancer may be a locally advanced or metastatic HER2-positive cancer. In some instances, the HER2-positive cancer is a HER2-positive breast cancer or a HER2-positive gastric cancer. In some embodiments, the HER2-positive cancer is selected from the group consisting of a HER2-positive gastroesophageal junction cancer, a HER2-positive colorectal cancer, a HER2-positive lung cancer (e.g., a HER2-positive non-small cell lung carcinoma), a HER2-positive pancreatic cancer, a HER2-positive colorectal cancer, a HER2-positive bladder cancer, a HER2-positive salivary duct cancer, a HER2-positive ovarian cancer (e.g., a HER2-positive epithelial ovarian cancer), or a HER2-positive endometrial cancer. In some instances, the HER2-positive cancer is prostate cancer. In some embodiments, the HER2-positive cancer has metastasized to the central nervous system (CNS). In some instances, the metastasized HER2-cancer has formed CNS neoplasms.

[2039] In some embodiments, an AAV particle (e.g., an AAV particle comprising an AAV capsid variant) e.g., a plurality of particles, of the present disclosure may be used as a therapy for a neuro-oncological disorder. In some embodiments, the neuro-oncological disorder is a cancer of primary CNS origin (e.g., a cancer of a CNS cell and/or CNS tissue). In some embodiments, the neuro-oncological disorder is metastatic cancer in a CNS cell, CNS region, and/or a CNS tissue. Examples of primary CNS cancers could be gliomas (which may include glioblastoma (also known as glioblastoma multiforme), astrocytomas, oligodendrogliomas, and ependymomas, and mixed gliomas), meningiomas, medulloblastomas, neuromas, and primary CNS lymphoma (in the brain, spinal cord, or meninges), among others. Examples of metastatic cancers include those originating in another tissue or organ, e.g., breast, lung, lymphoma, leukemia, melanoma (skin cancer), colon, kidney, prostate, or other types that metastasize to brain.

[2040] In some embodiments, an AAV particle (e.g., an AAV particle comprising an AAV capsid variant), e.g., a plurality of particles, of the present disclosure may be used as a therapy for a muscular disorder or a neuromuscular disorder.

[2041] In some embodiments, an AAV particle (e.g., an AAV particle comprising an AAV capsid variant), e.g., a plurality of particles, of the present disclosure may be used as a therapy for a cardiac disease or heart disease and/or method of improving (e.g., enhancing) cardiac function in a subject. In some embodiments, the cardiac disease is a cardiomyopathy (e.g., arrhythmogenic right ventricular cardiomyopathy, dilated cardiomyopathy, or hypertrophic cardiomyopathy), congestive heart failure, tachycardia (e.g., catecholaminergic polymorphic ventricular tachycardia), ischemic heart disease, and/or myocardial infarction.

[2042] In some embodiments, administration of the AAV particle described herein (e.g., an AAV particle comprising an AAV capsid polypeptide, e.g., an AAV capsid variant) to a subject may increase target gene, mRNA, and/or protein levels in a subject, relative to a control, e.g., the gene, mRNA, and/or mRNA levels in the subject prior to receiving AAV particle. The target gene, mRNA, and/or protein levels may be increased by about 30%, 40%, 50%, 60%, 70%, 80%, 85%, 90%, 95% and 100%, or at least 20-30%, 20-40%, 20-50%, 20-60%, 20-70%, 20-80%, 20-90%, 20-95%, 20-100%, 30-40%, 30-50%, 30-60%, 30-70%, 30-80%, 30-90%, 30-95%, 30-100%, 40-50%, 40-60%, 40-70%, 40-80%, 40-90%, 40-95%, 40-100%, 50-60%, 50-70%, 50-80%, 50-90%, 50-95%, 50-100%, 60-70%, 60-80%, 60-90%, 60-95%, 60-100%, 70-80%, 70-90%, 70-95%, 70-100%, 80-90%, 80-95%, 80-100%, 90-95%, 90-100% or 95-100% in a subject such as, but not limited to, the CNS, a region of the CNS, or a specific cell of the CNS, or a muscle, a region of a muscle, or a cell of a muscle, of a subject. In some embodiments, cell of the CNS comprises an astrocyte, microglia, cortical neuron, hippocampal neuron, DRG and/or sympathetic neuron, sensory neuron, oligodendrocyte, motor neuron, or combination thereof. As a non-limiting example, the AAV particles may increase the gene, mRNA, and/or protein levels of a target protein by fold increases over baseline. In some embodiments, AAV particles lead to 5-6 times higher levels of a target gene, mRNA, or protein.

[2043] In some embodiments, administration of the AAV particle described herein (e.g., an AAV particle comprising an AAV capsid polypeptide, e.g., an AAV capsid variant), e.g., an AAV particle comprising a nucleic acid encoding a siRNA molecule or an antibody or antibody fragment, to a subject may decrease target gene, mRNA, and/or protein levels in a subject, relative to a control, e.g., the gene, mRNA, and/or mRNA levels in the subject prior to receiving AAV particle. The target gene, mRNA, and/or protein levels may be decreased by about 30%, 40%, 50%, 60%, 70%, 80%, 85%, 90%, 95% and 100%, or at least 20-30%, 20-40%, 20-50%, 20-60%, 20-70%, 20-80%, 20-90%, 20-95%, 20-100%, 30-40%, 30-50%, 30-60%, 30-70%, 30-80%, 30-90%, 30-95%, 30-100%, 40-50%, 40-60%, 40-70%, 40-80%, 40-90%, 40-95%, 40-100%, 50-60%, 50-70%, 50-80%, 50-90%, 50-95%, 50-100%, 60-70%, 60-80%, 60-90%, 60-95%, 60-100%, 70-80%, 70-90%, 70-95%, 70-100%, 80-90%, 80-95%, 80-100%, 90-95%, 90-100% or 95-100% in a subject such as, but not limited to, the CNS, a region of the CNS, or a specific cell of the CNS, or a muscle, a region of a muscle, or a cell of a muscle, of a subject. In some embodiments, cell of the CNS comprises an astrocyte, microglia, cortical neuron, hippocampal neuron, DRG and/or sympathetic neuron, sensory neuron, oligodendrocyte, motor neuron, or combination thereof. As a non-limiting example, the AAV particles may decrease the gene, mRNA, and/or protein levels of a target protein by fold decreases over baseline.

[2044] In some embodiments, the AAV particles of the present disclosure (e.g., an AAV particle comprising an AAV capsid polypeptide, e.g., an AAV capsid variant) may be used to increase target protein and reduce symptoms of neurological disease in a subject. In some embodiments, the AAV particles of the present disclosure (e.g., an AAV particle comprising an AAV capsid polypeptide, e.g., an AAV capsid variant) may be used to decrease target protein and reduce symptoms of neurological disease in a subject.

[2045] In some embodiments, the AAV particles of the present disclosure (e.g., an AAV particle comprising an AAV capsid polypeptide, e.g., an AAV capsid variant) may be used to reduce the decline of functional capacity and activities of daily living as measured by a standard evaluation system such as, but not limited to, the total functional capacity (TFC) scale.

[2046] In some embodiments, the AAV particles of the present disclosure (e.g., an AAV particle comprising an AAV capsid polypeptide, e.g., an AAV capsid variant) may be used to improve performance on any assessment used to measure symptoms of neurological disease. Such assessments include, but are not limited to ADAS-cog (Alzheimer Disease Assessment Scale—cognitive), MMSE (Mini-Mental State Examination), GDS (Geriatric Depression Scale), FAQ (Functional Activities Questionnaire), ADL (Activities of Daily Living), GPCOG (General Practitioner Assessment of Cognition), Mini-Cog, AMTS (Abbreviated Mental Test Score), Clock-drawing test, 6-CIT (6-item Cognitive Impairment Test), TYM (Test Your Memory), MoCa (Montreal Cognitive Assessment), ACE-R (Addenbrookes Cognitive Assessment), MIS (Memory Impairment Screen), BADLS (Bristol Activities of Daily Living Scale), Barthel Index, Functional Independence Measure, Instrumental Activities of Daily Living, IQCODE (Informant Questionnaire on Cognitive Decline in the Elderly), Neuropsychiatric Inventory, The Cohen-Mansfield Agitation Inventory, BEHAVE-AD, EuroQol, Short Form-36 and/or MBR Caregiver Strain Instrument, or any of the other tests as described in Sheehan B (Ther Adv Neurol Disord. 5(6):349-358 (2012)), the contents of which are herein incorporated by reference in their entirety.

[2047] In some embodiments, the present composition is administered as a solo therapeutic or as combination therapeutic for the treatment of a neurological disease/disorder or a neurodegenerative disorder, a muscular disorder or neuromuscular disorder, and/or a neuro-oncological disorder.

[2048] The AAV particles (e.g., an AAV particle comprising an AAV capsid variant) encoding the target protein may be used in combination with one or more other therapeutic agents. In some embodiments, compositions can be administered concurrently with, prior to, or subsequent to, additional therapeutic or medical procedures. In general, each agent will be administered at a dose and/or on a time schedule determined for that agent.

[2049] Therapeutic agents that may be used in combination with the AAV particles of the present disclosure (e.g., an AAV particle comprising an AAV capsid variant) can be small molecule compounds which are antioxidants, anti-inflammatory agents, anti-apoptosis agents, calcium regulators, anti-glutamatergic agents, structural protein inhibitors, compounds involved in muscle function, and compounds involved in metal ion regulation. As a non-limiting example, the combination therapy may be in combination with one or more neuroprotective agents such as small molecule compounds, growth factors and hormones which have been tested for their neuroprotective effect on motor neuron degeneration.

[2050] Compounds tested for treating neurological disease which may be used in combination with the AAV particles described herein include, but are not limited to, cholinesterase inhibitors (donepezil, rivastigmine, galantamine), NMDA receptor antagonists such as memantine, anti-psychotics, anti-depressants, anti-convulsants (e.g., sodium valproate and levetiracetam for myoclonus), secretase inhibitors, amyloid aggregation inhibitors, copper or zinc modulators, BACE inhibitors, inhibitors of tau aggregation, such as Methylene blue, phenothiazines, anthraquinones, n-phenylamines or rhodamines, microtubule stabilizers such as NAP, taxol or paclitaxel, kinase or phosphatase inhibitors such as those targeting GSK3β (lithium) or PP2A, immunization with Aβ peptides or tau phospho-epitopes, anti-tau or anti-amyloid antibodies, dopamine-depleting agents (e.g., tetrabenazine for chorea), benzodiazepines (e.g., clonazepam for myoclonus, chorea, dystonia, rigidity, and/or spasticity), amino acid precursors of dopamine (e.g., levodopa for rigidity), skeletal muscle relaxants (e.g., baclofen, tizanidine for rigidity and/or spasticity), inhibitors for acetylcholine release at the neuromuscular junction to cause muscle paralysis (e.g., botulinum toxin for bruxism and/or dystonia), atypical neuroleptics (e.g., olanzapine and quetiapine for psychosis and/or irritability, risperidone, sulpiride and haloperidol for psychosis, chorea and/or irritability, clozapine for treatment-resistant psychosis, aripiprazole for psychosis with prominent negative symptoms), selective serotonin reuptake inhibitors (SSRIs) (e.g., citalopram, fluoxetine, paroxetine, sertraline, mirtazapine, venlafaxine for depression, anxiety, obsessive compulsive behavior and/or irritability), hypnotics (e.g., xopiclone and/or zolpidem for altered sleep-wake cycle), anticonvulsants (e.g., sodium valproate and carbamazepine for mania or hypomania) and mood stabilizers (e.g., lithium for mania or hypomania).

[2051] Neurotrophic factors may be used in combination therapy with the AAV particles of the present disclosure (e.g., an AAV particle comprising an AAV capsid variant) for treating neurological disease. Generally, a neurotrophic factor is defined as a substance that promotes survival, growth, differentiation, proliferation and/or maturation of a neuron, or stimulates increased activity of a neuron. In some embodiments, the present methods further comprise delivery of one or more trophic factors into the subject in need of treatment. Trophic factors may include, but are not limited to, IGF-1, GDNF, BDNF, CTNF, VEGF, Colivelin, Xaliproden, Thyrotrophin-releasing hormone and ADNF, and variants thereof.

[2052] In one aspect, the AAV particle described herein (e.g., an AAV particle comprising an AAV capsid variant) may be co-administered with AAV particles expressing neurotrophic factors such as AAV-IGF-1 (See e.g., Vincent et al., Neuromolecular medicine, 2004, 6, 79-85; the contents of which are incorporated herein by reference in their entirety) and AAV-GDNF (See e.g., Wang et al., J Neurosci., 2002, 22, 6920-6928; the contents of which are incorporated herein by reference in their entirety).

[2053] In some embodiments, administration of the AAV particles (e.g., an AAV particle comprising an AAV capsid variant) to a subject will modulate, e.g., increase or decrease, the expression of a target protein in a subject and the modulation, e.g., increase or decrease of the presence, level, activity, and/or expression of the target protein will reduce the effects and/or symptoms of a neurological disease/disorder or a neurodegenerative disorder, a muscular disorder or neuromuscular disorder, and/or a neuro-oncological disorder in a subject.

### Definitions

[2054] Unless defined otherwise, all technical and scientific terms used herein have the same meaning as commonly understood by one of ordinary skill in the art to which the invention pertains.

[2055] Articles such as “a,” “an,” and “the” may mean one or more than one unless indicated to the contrary or otherwise evident from the context. Claims or descriptions that include “or” between one or more members of a group are considered satisfied if one, more than one, or all of the group members are present in, employed in, or otherwise relevant to a given product or process unless indicated to the contrary or otherwise evident from the context. The disclosure includes embodiments in which exactly one member of the group is present in, employed in, or otherwise relevant to a given product or process. The disclosure includes embodiments in which more than one, or the entire group members are present in, employed in, or otherwise relevant to a given product or process.

[2056] It is also noted that the term “comprising” is intended to be open and permits but does not require the inclusion of additional elements or steps. When the term “comprising” is used herein, the term “consisting of” and “consisting essentially thereof” is thus also encompassed and disclosed.

[2057] Where ranges are given, endpoints are included. Furthermore, it is to be understood that unless otherwise indicated or otherwise evident from the context and understanding of one of ordinary skill in the art, values that are expressed as ranges can assume any specific value or subrange within the stated ranges in different embodiments of the disclosure, to the tenth of the unit of the lower limit of the range, unless the context clearly dictates otherwise.

[2058] Adeno-associated virus: As used herein, the term “adeno-associated virus” or “AAV” refers to members of the dependovirus genus or a variant, e.g., a functional variant, thereof. In some embodiments, the AAV is wildtype, or naturally occurring. In some embodiments, the AAV is recombinant.

[2059] AAV Particle: As used herein, an “AAV particle” refers to a particle or a virion comprising an AAV capsid, e.g., an AAV capsid variant, and a polynucleotide, e.g., a viral genome or a vector genome. In some embodiments, the viral genome of the AAV particle comprises at least one payload region and at least one ITR. In some embodiments, an AAV particle of the disclosure is an AAV particle comprising an AAV variant. In some embodiments, the AAV particle is capable of delivering a nucleic acid, e.g., a payload region, encoding a payload to cells, typically, mammalian, e.g., human, cells. In some embodiments, an AAV particle of the present disclosure may be produced recombinantly. In some embodiments, an AAV particle may be derived from any serotype, described herein or known in the art, including combinations of serotypes (e.g., “pseudotyped” AAV) or from various genomes (e.g., single stranded or self-complementary). In some embodiments, the AAV particle may be replication defective and/or targeted. It is to be understood that reference to the AAV particle of the disclosure also includes pharmaceutical compositions thereof, even if not explicitly recited.

[2060] Administering: As used herein, the term “administering” refers to providing a pharmaceutical agent or composition to a subject.

[2061] Amelioration: As used herein, the term “amelioration” or “ameliorating” refers to a lessening of severity of at least one indicator of a condition or disease. For example, in the context of neurodegeneration disorder, amelioration includes the reduction of neuron loss.

[2062] Amplicon: As used herein, “amplicon” may refer to any piece of RNA or DNA formed as the product of amplification events, e.g. PCR. In some embodiments, full-length capsid amplicons may be used as templates for next generation sequencing (NGS) library generation. Full-length capsid amplicons may be used for cloning into a DNA library for any number of additional rounds of AAV selection as described herein.

[2063] Animal: As used herein, the term “animal” refers to any member of the animal kingdom. In some embodiments, “animal” refers to humans at any stage of development. In some embodiments, “animal” refers to non-human animals at any stage of development. In certain embodiments, the non-human animal is a mammal (e.g., a rodent, a mouse, a rat, a rabbit, a monkey, a dog, a cat, a sheep, cattle, a primate, or a pig). In some embodiments, animals include, but are not limited to, mammals, birds, reptiles, amphibians, fish, and worms. In some embodiments, the animal is a transgenic animal, genetically engineered animal, or a clone.

[2064] Antisense strand: As used herein, the term “the antisense strand” or “the first strand” or “the guide strand” of a siRNA molecule refers to a strand that is substantially complementary to a section of about 10-50 nucleotides, e.g., about 15-30, 16-25, 18-23 or 19-22 nucleotides of the mRNA of a gene targeted for silencing. The antisense strand or first strand has sequence sufficiently complementary to the desired target mRNA sequence to direct target-specific silencing, e.g., complementarity sufficient to trigger the destruction of the desired target mRNA by the RNAi machinery or process.

[2065] Approximately: As used herein, the term “approximately” or “about,” as applied to one or more values of interest, refers to a value that is similar to a stated reference value. In certain embodiments, the term “approximately” or “about” refers to a range of values that fall within 25%, 20%, 19%, 18%, 17%, 16%, 15%, 14%, 13%, 12%, 11%, 10%, 9%, 8%, 7%, 6%, 5%, 4%, 3%, 2%, 1%, or less in either direction (greater than or less than) of the stated reference value unless otherwise stated or otherwise evident from the context (except where such number would exceed 100% of a possible value).

[2066] Biopanning: As used herein, the term “biopanning” refers to an AAV capsid library selection process comprising administration of an AAV particle with enhanced tissue- and/or cell type-specific transduction to a cell and/or subject; extraction of nucleotides encoded by said AAV particle from said transduced tissue- and/or cell type-specific; and, use of the extracted nucleotides for cloning into a nucleotide library for the generation of AAV particles for subsequent rounds of the same.

[2067] Capsid: As used herein, the term “capsid” refers to the exterior, e.g., a protein shell, of a virus particle, e.g., an AAV particle, that is substantially (e.g., >50%, >60%, >70%, >80%, >90%, >95%, >99%, or 100%) protein. In some embodiments, the capsid is an AAV capsid comprising an AAV capsid protein described herein, e.g., a VP1, VP2, and/or VP3 polypeptide. The AAV capsid protein can be a wild-type AAV capsid protein or a variant, e.g., a structural and/or functional variant from a wild-type or a reference capsid protein, referred to herein as an “AAV capsid variant.” In some embodiments, the AAV capsid variant described herein has the ability to enclose, e.g., encapsulate, a viral genome and/or is capable of entry into a cell, e.g., a mammalian cell. In some embodiments, the AAV capsid variant described herein may have modified tropism compared to that of a wild-type AAV capsid, e.g., the corresponding wild-type capsid.

[2068] Complementary and substantially complementary: As used herein, the term “complementary” refers to the ability of polynucleotides to form base pairs with one another. Base pairs are typically formed by hydrogen bonds between nucleotide units in antiparallel polynucleotide strands. Complementary polynucleotide strands can form base pairs in the Watson-Crick manner (e.g., A to T, A to U, C to G), or in any other manner that allows for the formation of duplexes. As persons skilled in the art are aware, when using RNA as opposed to DNA, uracil rather than thymine is the base that is considered to be complementary to adenine. However, when a U is denoted in the context of the present disclosure, the ability to substitute a T is implied, unless otherwise stated. Perfect complementarity or 100% complementarity refers to the situation in which each nucleotide unit of one polynucleotide strand can form a hydrogen bond with a nucleotide unit of a second polynucleotide strand. Less than perfect complementarity refers to the situation in which some, but not all, nucleotide units of two strands can form hydrogen bond with each other. For example, for two 20-mers, if only two base pairs on each strand can form a hydrogen bond with each other, the polynucleotide strands exhibit 10% complementarity. In the same example, if 18 base pairs on each strand can form hydrogen bonds with each other, the polynucleotide strands exhibit 90% complementarity. The term “complementary” as used herein can encompass fully complementary, partially complementary, or substantially complementary. As used herein, the term “substantially complementary” means that the siRNA has a sequence (e.g., in the antisense strand) which is sufficient to bind the desired target mRNA, and to trigger the RNA silencing of the target mRNA. “Fully complementary”, “perfect complementarity”, or “100% complementarity” refers to the situation in which each nucleotide unit of one polynucleotide or oligonucleotide strand can base-pair with a nucleotide unit of a second polynucleotide or oligonucleotide strand.

[2069] Control Elements: As used herein, “control elements”, “regulatory control elements” or “regulatory sequences” refers to promoter regions, polyadenylation signals, transcription termination sequences, upstream regulatory domains, origins of replication, internal ribosome entry sites (“IRES”), enhancers, and the like, which provide for the replication, transcription and translation of a coding sequence in a recipient cell. Not all of these control elements need always be present as long as the selected coding sequence is capable of being replicated, transcribed and/or translated in an appropriate host cell.

[2070] Delivery: As used herein, “delivery” refers to the act or manner of delivering an AAV particle, a compound, substance, entity, moiety, cargo or payload.

[2071] Element: As used herein, the term “element” refers to a distinct portion of an entity. In some embodiments, an element may be a polynucleotide sequence with a specific purpose, incorporated into a longer polynucleotide sequence.

[2072] Encapsulate: As used herein, the term “encapsulate” means to enclose, surround or encase. As an example, a capsid protein, e.g., an AAV capsid variant, often encapsulates a viral genome. In some embodiments, encapsulate within a capsid, e.g., an AAV capsid variant, encompasses 100% coverage by a capsid, as well as less than 100% coverage, e.g., 95%, 90%, 85%, 80%, 70%, 60% or less. For example, gaps or discontinuities may be present in the capsid so long as the viral genome is retained in the capsid, e.g., prior to entry into a cell.

[2073] Effective Amount: As used herein, the term “effective amount” of an agent is that amount sufficient to effect beneficial or desired results, for example, clinical results, and, as such, an “effective amount” depends upon the context in which it is being applied. For example, in the context of administering an agent that treats cancer, an effective amount of an agent is, for example, an amount sufficient to achieve treatment, as defined herein, of cancer, as compared to the response obtained without administration of the agent.

[2074] Expression: As used herein, “expression” of a nucleic acid sequence refers to one or more of the following events: (1) production of an RNA template from a DNA sequence (e.g., by transcription); (2) processing of an RNA transcript (e.g., by splicing, editing, 5′ cap formation, and/or 3′ end processing); (3) translation of an RNA into a polypeptide or protein; and (4) post-translational modification of a polypeptide or protein.

[2075] Formulation: As used herein, a “formulation” includes at least one AAV particle (active ingredient) and an excipient, and/or an inactive ingredient.

[2076] Fragment: A “fragment,” as used herein, refers to a portion. For example, an antibody fragment may comprise a CDR, or a heavy chain variable region, or a scFv, etc.

[2077] Homology: As used herein, the term “homology” refers to the overall relatedness between polymeric molecules, e.g. between polynucleotide molecules (e.g. DNA molecules and/or RNA molecules) and/or between polypeptide molecules. In some embodiments, polymeric molecules are considered to be “homologous” to one another if their sequences are at least 25%, 30%, 35%, 40%, 45%, 50%, 55%, 60%, 65%, 70%, 75%, 80%, 85%, 90%, 95%, or 99% identical or similar. The term “homologous” necessarily refers to a comparison between at least two sequences (polynucleotide or polypeptide sequences). In accordance with the disclosure, two polynucleotide sequences are considered to be homologous if the polypeptides they encode are at least about 50%, 60%, 70%, 80%, 90%, 95%, or even 99% for at least one stretch of at least about 20 amino acids. In some embodiments, homologous polynucleotide sequences are characterized by the ability to encode a stretch of at least 4-5 uniquely specified amino acids. For polynucleotide sequences less than 60 nucleotides in length, homology is determined by the ability to encode a stretch of at least 4-5 uniquely specified amino acids. In accordance with the disclosure, two protein sequences are considered to be homologous if the proteins are at least about 50%, 60%, 70%, 80%, or 90% identical for at least one stretch of at least about 20 amino acids.

[2078] Identity: As used herein, the term “identity” refers to the overall relatedness between polymeric molecules, e.g., between polynucleotide molecules (e.g. DNA molecules and/or RNA molecules) and/or between polypeptide molecules. Calculation of the percent identity of two polynucleotide sequences, for example, can be performed by aligning the two sequences for optimal comparison purposes (e.g., gaps can be introduced in one or both of a first and a second nucleic acid sequences for optimal alignment and non-identical sequences can be disregarded for comparison purposes). In certain embodiments, the length of a sequence aligned for comparison purposes is at least 30%, at least 40%, at least 50%, at least 60%, at least 70%, at least 80%, at least 90%, at least 95%, or 100% of the length of the reference sequence. The nucleotides at corresponding nucleotide positions are then compared. When a position in the first sequence is occupied by the same nucleotide as the corresponding position in the second sequence, then the molecules are identical at that position. The percent identity between the two sequences is a function of the number of identical positions shared by the sequences, taking into account the number of gaps, and the length of each gap, which needs to be introduced for optimal alignment of the two sequences. The comparison of sequences and determination of percent identity between two sequences can be accomplished using a mathematical algorithm. For example, the percent identity between two nucleotide sequences can be determined using methods such as those described in Computational Molecular Biology, Lesk, A. M., ed., Oxford University Press, New York, 1988; Biocomputing: Informatics and Genome Projects, Smith, D. W., ed., Academic Press, New York, 1993; Sequence Analysis in Molecular Biology, von Heinje, G., Academic Press, 1987; Computer Analysis of Sequence Data, Part I, Griffin, A. M., and Griffin, H. G., eds., Humana Press, New Jersey, 1994; and Sequence Analysis Primer, Gribskov, M. and Devereux, J., eds., M Stockton Press, New York, 1991; the contents of each of which are incorporated herein by reference in their entirety. For example, the percent identity between two nucleotide sequences can be determined using the algorithm of Meyers and Miller (CABIOS, 1989, 4:11-17), which has been incorporated into the ALIGN program (version 2.0) using a PAM120 weight residue table, a gap length penalty of 12 and a gap penalty of 4. The percent identity between two nucleotide sequences can, alternatively, be determined using the GAP program in the GCG software package using an NWSgapdna.CMP matrix. Methods commonly employed to determine percent identity between sequences include, but are not limited to those disclosed in Carillo, H., and Lipman, D., SIAM J Applied Math., 48:1073 (1988); incorporated herein by reference. Techniques for determining identity are codified in publicly available computer programs. Exemplary computer software to determine homology between two sequences include, but are not limited to, GCG program package, Devereux, J., et al., Nucleic Acids Research, 12(1), 387 (1984)), BLASTP, BLASTN, and FASTA Altschul, S. F. et al., J. Molec. Biol., 215, 403 (1990)).

[2079] Inhibit expression of a gene: As used herein, the phrase “inhibit expression of a gene” means to cause a reduction in the amount of an expression product of the gene. The expression product can be an RNA transcribed from the gene (e.g., an mRNA) or a polypeptide translated from an mRNA transcribed from the gene. Typically, a reduction in the level of an mRNA results in a reduction in the level of a polypeptide translated therefrom. The level of expression may be determined using standard techniques for measuring mRNA or protein.

[2080] Inverted terminal repeat: As used herein, the term “inverted terminal repeat” or “ITR” refers to a cis-regulatory element for the packaging of polynucleotide sequences into viral capsids.

[2081] Isolated: As used herein, the term “isolated” refers to a substance or entity that is altered or removed from the natural state, e.g., altered or removed from at least some of component with which it is associated in the natural state. For example, a nucleic acid or a peptide naturally present in a living animal is not “isolated,” but the same nucleic acid or peptide partially or completely separated from the coexisting materials of its natural state is “isolated.” An isolated nucleic acid or protein can exist in substantially purified form, or can exist in a non-native environment such as, for example, a host cell. Such polynucleotides could be part of a vector and/or such polynucleotides or polypeptides could be part of a composition, and still be isolated in that such vector or composition is not part of the environment in which it is found in nature. In some embodiments, an isolated nucleic acid is recombinant, e.g., incorporated into a vector.

[2082] Library: As used herein, the term “library” refers to a diverse collection of linear polypeptides, polynucleotides, viral particles, or viral vectors. As examples, a library may be a DNA library or an AAV capsid library.

[2083] Molecular scaffold: As used herein a “molecular scaffold” is a framework or starting molecule that forms the sequence or structural basis against which to design or make a subsequent molecule.

[2084] Neurological disease: As used herein, a “neurological disease” is any disease associated with the central or peripheral nervous system and components thereof (e.g., neurons).

[2085] Orthogonal evolution: As used herein, the term “orthogonal evolution” refers to a method wherein AAV particles are administered for a first round of AAV selection as described herein across a set of any number of cell- and/or subject-types that may be from different species and/or strains, and wherein any number of additional, i.e., subsequent, AAV selection rounds are performed either across a set of any number of cell- and/or subject-types that may be from different species and/or strains, or across a set of any number of cell- and/or subject-types that may be from the same species and/or strain.

[2086] Open reading frame: As used herein, “open reading frame” or “ORF” refers to a sequence which does not contain a stop codon in a given reading frame.

[2087] Particle: As used herein, a “particle” is a virus comprised of at least two components, a protein capsid and a polynucleotide sequence enclosed within the capsid.

[2088] Payload region: As used herein, a “payload region” is any nucleic acid sequence (e.g., within the viral genome) which encodes one or more “payloads” of the disclosure. As non-limiting examples, a payload region may be a nucleic acid sequence within the viral genome of an AAV particle, which encodes a payload, wherein the payload is an RNAi agent or a polypeptide. Payloads of the present disclosure may be, but are not limited to, peptides, polypeptides, proteins, antibodies, RNAi agents, etc.

[2089] Polypeptide: As used herein, “polypeptide” means a polymer of amino acid residues (natural or unnatural) linked together most often by peptide bonds. The term, as used herein, refers to proteins, polypeptides, and peptides of any size, structure, or function. In some instances, the polypeptide encoded is smaller than about 50 amino acids and the polypeptide is then termed a peptide. If the polypeptide is a peptide, it will be at least about 2, 3, 4, or at least 5 amino acid residues long. Thus, polypeptides include gene products, naturally occurring polypeptides, synthetic polypeptides, homologs, orthologs, paralogs, fragments and other equivalents, variants, and analogs of the foregoing. A polypeptide may be a single molecule or may be a multi-molecular complex such as a dimer, trimer or tetramer. They may also comprise single chain or multichain polypeptides and may be associated or linked. The term polypeptide may also apply to amino acid polymers in which one or more amino acid residues are an artificial chemical analogue of a corresponding naturally occurring amino acid.

[2090] Polypeptide variant: The term “polypeptide variant” refers to molecules which differ in their amino acid sequence from a native or reference sequence. The amino acid sequence variants may possess substitutions, deletions, and/or insertions at certain positions within the amino acid sequence, as compared to a native or reference sequence. In some embodiments, a variant comprises a sequence having at least about 50%, at least about 80%, or at least about 90%, identical (homologous) to a native or a reference sequence.

[2091] Peptide: As used herein, “peptide” is less than or equal to 50 amino acids long, e.g., about 5, 10, 15, 20, 25, 30, 35, 40, 45, or 50 amino acids long.

[2092] Pharmaceutically acceptable: The phrase “pharmaceutically acceptable” is employed herein to refer to those compounds, materials, compositions, and/or dosage forms which are, within the scope of sound medical judgment, suitable for use in contact with the tissues of human beings and animals without excessive toxicity, irritation, allergic response, or other problem or complication, commensurate with a reasonable benefit/risk ratio.

[2093] Preventing: As used herein, the term “preventing” or “prevention” refers to partially or completely delaying onset of an infection, disease, disorder and/or condition; partially or completely delaying onset of one or more symptoms, features, or clinical manifestations of a particular infection, disease, disorder, and/or condition; partially or completely delaying onset of one or more symptoms, features, or manifestations of a particular infection, disease, disorder, and/or condition; partially or completely delaying progression from an infection, a particular disease, disorder and/or condition; and/or decreasing the risk of developing pathology associated with the infection, the disease, disorder, and/or condition.

[2094] Prophylactic: As used herein, “prophylactic” refers to a therapeutic or course of action used to prevent the spread of disease.

[2095] Prophylaxis: As used herein, a “prophylaxis” refers to a measure taken to maintain health and prevent the spread of disease.

[2096] Region: As used herein, the term “region” refers to a zone or general area. In some embodiments, when referring to a protein or protein module, a region may comprise a linear sequence of amino acids along the protein or protein module or may comprise a three-dimensional area, an epitope and/or a cluster of epitopes. In some embodiments, regions comprise terminal regions. As used herein, the term “terminal region” refers to regions located at the ends or termini of a given agent. When referring to proteins, terminal regions may comprise N- and/or C-termini.

[2097] In some embodiments, when referring to a polynucleotide, a region may comprise a linear sequence of nucleic acids along the polynucleotide or may comprise a three-dimensional area, secondary structure, or tertiary structure. In some embodiments, regions comprise terminal regions. As used herein, the term “terminal region” refers to regions located at the ends or termini of a given agent. When referring to polynucleotides, terminal regions may comprise 5′ and/or 3′ termini.

[2098] RNA or RNA molecule: As used herein, the term “RNA” or “RNA molecule” or “ribonucleic acid molecule” refers to a polymer of ribonucleotides; the term “DNA” or “DNA molecule” or “deoxyribonucleic acid molecule” refers to a polymer of deoxyribonucleotides. DNA and RNA can be synthesized naturally, e.g., by DNA replication and transcription of DNA, respectively; or be chemically synthesized. DNA and RNA can be single-stranded (i.e., ssRNA or ssDNA, respectively) or multi-stranded (e.g., double stranded, i.e., dsRNA and dsDNA, respectively). The term “mRNA” or “messenger RNA”, as used herein, refers to a single stranded RNA that encodes the amino acid sequence of one or more polypeptide chains.

[2099] RNA interfering or RNAi: As used herein, the term “RNA interfering” or “RNAi” refers to a sequence specific regulatory mechanism mediated by RNA molecules which results in the inhibition or interfering or “silencing” of the expression of a corresponding protein-coding gene. RNAi has been observed in many types of organisms, including plants, animals and fungi. RNAi occurs in cells naturally to remove foreign RNAs (e.g., viral RNAs). Natural RNAi proceeds via fragments cleaved from free dsRNA which direct the degradative mechanism to other similar RNA sequences. RNAi is controlled by the RNA-induced silencing complex (RISC) and is initiated by short/small dsRNA molecules in cell cytoplasm, where they interact with the catalytic RISC component argonaute. The dsRNA molecules can be introduced into cells exogenously. Exogenous dsRNA initiates RNAi by activating the ribonuclease protein Dicer, which binds and cleaves dsRNAs to produce double-stranded fragments of 21-25 base pairs with a few unpaired overhang bases on each end. These short double stranded fragments are called small interfering RNAs (siRNAs).

[2100] RNAi agent: As used herein, the term “RNAi agent” refers to an RNA molecule, or its derivative, that can induce inhibition, interfering, or “silencing” of the expression of a target gene and/or its protein product. An RNAi agent may knock-out (virtually eliminate or eliminate) expression, or knock-down (lessen or decrease) expression. The RNAi agent may be, but is not limited to, dsRNA, siRNA, shRNA, pre-miRNA, pri-miRNA, miRNA, stRNA, lncRNA, piRNA, or snoRNA.

[2101] miR binding site: As used herein, a “miR binding site” comprises a nucleic acid sequence (whether RNA or DNA, e.g., differ by “U” of RNA or “T” in DNA) that is capable of binding, or binds, in whole or in part to a microRNA (miR) through complete or partial hybridization. Typically, such binding occurs between the miR and the miR binding site in the reverse complement orientation. In some embodiments, the miR binding site is transcribed from the AAV vector genome encoding the miR binding site.

[2102] In some embodiments, a miR binding site may be encoded or transcribed in series. Such a “miR binding site series” or “miR BSs” may include two or more miR binding sites having the same or different nucleic acid sequence.

[2103] Spacer: As used here, a “spacer” is generally any selected nucleic acid sequence of, e.g., 1, 2, 3, 4, 5, 6, 7, 8, 9, or 10 nucleotides in length, which is located between two or more consecutive miR binding site sequences. Spacers may also be more than 10 nucleotides in length, e.g., 20, 30, 40, or 50 or more than 50 nucleotides.

[2104] Sample: As used herein, the term “sample” or “biological sample” refers to a subset of its tissues, cells, nucleic acids, or component parts (e.g. body fluids, including but not limited to blood, serum, mucus, lymphatic fluid, synovial fluid, cerebrospinal fluid, saliva, amniotic fluid, amniotic cord blood, urine, vaginal fluid and semen).

[2105] Self-complementary viral particle: As used herein, a “self-complementary viral particle” is a particle comprised of at least two components, a protein capsid and a self-complementary viral genome enclosed within the capsid.

[2106] Sense Strand: As used herein, the term “the sense strand” or “the second strand” or “the passenger strand” of a siRNA molecule refers to a strand that is complementary to the antisense strand or first strand. The antisense and sense strands of a siRNA molecule are hybridized to form a duplex structure. As used herein, a “siRNA duplex” includes a siRNA strand having sufficient complementarity to a section of about 10-50 nucleotides of the mRNA of the gene targeted for silencing and a siRNA strand having sufficient complementarity to form a duplex with the other siRNA strand.

[2107] Similarity: As used herein, the term “similarity” refers to the overall relatedness between polymeric molecules, e.g. between polynucleotide molecules (e.g. DNA molecules and/or RNA molecules) and/or between polypeptide molecules. Calculation of percent similarity of polymeric molecules to one another can be performed in the same manner as a calculation of percent identity, except that calculation of percent similarity takes into account conservative substitutions as is understood in the art.

[2108] Short interfering RNA or siRNA: As used herein, the terms “short interfering RNA,” “small interfering RNA” or “siRNA” refer to an RNA molecule (or RNA analog) comprising between about 5-60 nucleotides (or nucleotide analogs) which is capable of directing or mediating RNAi. Preferably, a siRNA molecule comprises between about 15-30 nucleotides or nucleotide analogs, such as between about 16-25 nucleotides (or nucleotide analogs), between about 18-23 nucleotides (or nucleotide analogs), between about 19-22 nucleotides (or nucleotide analogs) (e.g., 19, 20, 21 or 22 nucleotides or nucleotide analogs), between about 19-25 nucleotides (or nucleotide analogs), and between about 19-24 nucleotides (or nucleotide analogs). The term “short” siRNA refers to a siRNA comprising 5-23 nucleotides, preferably 21 nucleotides (or nucleotide analogs), for example, 19, 20, 21 or 22 nucleotides. The term “long” siRNA refers to a siRNA comprising 24-60 nucleotides, preferably about 24-25 nucleotides, for example, 23, 24, 25 or 26 nucleotides. Short siRNAs may, in some instances, include fewer than 19 nucleotides, e.g., 16, 17 or 18 nucleotides, or as few as 5 nucleotides, provided that the shorter siRNA retains the ability to mediate RNAi. Likewise, long siRNAs may, in some instances, include more than 26 nucleotides, e.g., 27, 28, 29, 30, 35, 40, 45, 50, 55, or even 60 nucleotides, provided that the longer siRNA retains the ability to mediate RNAi or translational repression absent further processing, e.g., enzymatic processing, to a short siRNA. siRNAs can be single stranded RNA molecules (ss-siRNAs) or double stranded RNA molecules (ds-siRNAs) comprising a sense strand and an antisense strand which hybridized to form a duplex structure called an siRNA duplex.

[2109] Subject: As used herein, the term “subject” or “patient” refers to any organism to which a composition in accordance with the disclosure may be administered, e.g., for experimental, diagnostic, prophylactic, and/or therapeutic purposes. Typical subjects include animals (e.g., mammals such as mice, rats, rabbits, non-human primates, and humans) and/or plants.

[2110] Substantially: As used herein, the term “substantially” refers to the qualitative condition of exhibiting total or near-total extent or degree of a characteristic or property of interest. One of ordinary skill in the biological arts will understand that biological and chemical phenomena rarely, if ever, go to completion and/or proceed to completeness or achieve or avoid an absolute result. The term “substantially” is therefore used herein to capture the potential lack of completeness inherent in many biological and chemical phenomena.

[2111] Target Cells: As used herein, “target cells” or “target tissue” refers to any one or more cells of interest. The cells may be found in vitro, in vivo, in situ or in the tissue or organ of an organism. The organism may be an animal, preferably a mammal, more preferably a human and most preferably a patient.

[2112] Therapeutic Agent: The term “therapeutic agent” refers to any agent that, when administered to a subject, has a therapeutic, diagnostic, and/or prophylactic effect and/or elicits a desired biological and/or pharmacological effect.

[2113] Therapeutically effective amount: As used herein, the term “therapeutically effective amount” means an amount of an agent to be delivered (e.g., nucleic acid, drug, therapeutic agent, diagnostic agent, prophylactic agent, etc.) that is sufficient, when administered to a subject suffering from or susceptible to an infection, disease, disorder, and/or condition, to treat, improve symptoms of, diagnose, prevent, and/or delay the onset of the infection, disease, disorder, and/or condition. In some embodiments, a therapeutically effective amount is provided in a single dose.

[2114] Therapeutically effective outcome: As used herein, the term “therapeutically effective outcome” means an outcome that is sufficient in a subject suffering from or susceptible to an infection, disease, disorder, and/or condition, to treat, improve symptoms of, diagnose, prevent, and/or delay the onset of the infection, disease, disorder, and/or condition.

[2115] Treating: As used herein, the term “treating” refers to partially or completely alleviating, ameliorating, improving, relieving, delaying onset of, inhibiting progression of, reducing severity of, and/or reducing incidence of one or more symptoms or features of a particular infection, disease, disorder, and/or condition. For example, “treating” cancer may refer to inhibiting survival, growth, and/or spread of a tumor. Treatment may be administered to a subject who does not exhibit signs of a disease, disorder, and/or condition and/or to a subject who exhibits only early signs of a disease, disorder, and/or condition for the purpose of decreasing the risk of developing pathology associated with the disease, disorder, and/or condition.

[2116] Conservative amino acid substitution: As used herein, a “conservative amino acid substitution” is one in which the amino acid residue is replaced with an amino acid residue having a similar side chain. Families of amino acid residues having similar side chains have been defined in the art. These families include amino acids with basic side chains (e.g., lysine, arginine, histidine), acidic side chains (e.g., aspartic acid, glutamic acid), uncharged polar side chains (e.g., glycine, asparagine, glutamine, serine, threonine, tyrosine, cysteine), nonpolar side chains (e.g., alanine, valine, leucine, isoleucine, proline, phenylalanine, methionine, tryptophan), beta-branched side chains (e.g., threonine, valine, isoleucine) and aromatic side chains (e.g., tyrosine, phenylalanine, tryptophan, histidine).

[2117] Variant: As used herein, the term “variant” refers to a polypeptide or polynucleotide that has an amino acid or a nucleotide sequence that is substantially identical, e.g., having at least 70%, 75%, 80%, 85%, 90%, 95% or 99% sequence identity to a reference sequence. In some embodiments, the variant is a functional variant.

[2118] Functional Variant: As used herein, the term “functional variant” refers to a polypeptide variant or a polynucleotide variant that has at least one activity of the reference sequence.

[2119] Insertional Variant: “Insertional variants” when referring to polypeptides are those with one or more amino acids inserted, e.g., immediately adjacent or subsequent, to a position in an amino acid sequence. “Immediately adjacent” or “immediately subsequent” to an amino acid means connected to either the alpha-carboxy or alpha-amino functional group of the amino acid.

[2120] Deletional Variant: “Deletional variants” when referring to polypeptides, are those with one or more amino acids in deleted from a reference protein.

[2121] Vector: As used herein, the term “vector” refers to any molecule or moiety which transports, transduces or otherwise acts as a carrier of a heterologous molecule. In some embodiments, vectors may be plasmids. In some embodiments, vectors may be viruses. An AAV particle is an example of a vector. Vectors of the present disclosure may be produced recombinantly and may be based on and/or may comprise adeno-associated virus (AAV) parent or reference sequences. The heterologous molecule may be a polynucleotide and/or a polypeptide.

[2122] Viral Genome: As used herein, the terms “viral genome” or “vector genome” refer to the nucleic acid sequence(s) encapsulated in an AAV particle. A viral genome comprises a nucleic acid sequence with at least one payload region encoding a payload and at least one ITR.

### EQUIVALENTS AND SCOPE

[2123] The disclosures of each and every patent, patent application, and publication cited herein are hereby incorporated herein by reference in their entirety. Those skilled in the art will recognize or be able to ascertain using no more than routine experimentation, many equivalents to the specific embodiments in accordance with the disclosure described herein. The scope of the present disclosure is not intended to be limited to the above Description, but rather is as set forth in the appended claims.

[2124] In addition, it is to be understood that any particular embodiment of the present disclosure that falls within the prior art may be explicitly excluded from any one or more of the claims. Since such embodiments are deemed to be known to one of ordinary skill in the art, they may be excluded even if the exclusion is not set forth explicitly herein. Any particular embodiment of the compositions of the disclosure (e.g., any antibiotic, therapeutic or active ingredient; any method of production; any method of use; etc.) can be excluded from any one or more claims, for any reason, whether or not related to the existence of prior art.

[2125] It is to be understood that the words which have been used are words of description rather than limitation, and that changes may be made within the purview of the appended claims without departing from the true scope and spirit of the disclosure in its broader aspects.

[2126] While the present disclosure has been described at some length and with some particularity with respect to the several described embodiments, it is not intended that it should be limited to any such particulars or embodiments or any particular embodiment, but it is to be construed with references to the appended claims so as to provide the broadest possible interpretation of such claims in view of the prior art and, therefore, to effectively encompass the intended scope of the disclosure.

[2127] The present disclosure is further illustrated by the following non-limiting examples.

### EXAMPLES

### Example 1. Peptide Display Capsid Library Configuration

[2128] Peptide display capsid libraries are configured by insertion of randomized n-mer amino acids such as, but not limited to, 5-mer, 6-mer, 7-mer and/or 9-mer amino acids, into the surface-exposed hypervariable loop I, loop IV, loop VI, and/or loop VIII region of any AAV capsid serotype, including AAV5, AAV6, or AAV-DJ8, as well as AAV9 capsids, and/or variants thereof. The genes encoding the peptide display capsid library are under the control of any promotor, depending on the desired tropism, e.g., a neuron-specific synapsin promoter (SYN or Syn), or an astrocyte-specific GFAP promoter.

[2129] Peptide display capsid libraries are further configured such that the n-mer peptide insertion(s) follows a contiguous (or continuous) design and/or a noncontiguous (or noncontinuous), or split design, or combination thereof, with insertion position(s) mapped using a sliding window algorithm. As a non-limiting example, the peptide insertion may be an AAV9 6-mer contiguous peptide insertion with a sliding window originating at any amino acid position, e.g., amino acids 454-461. As another non-limiting example, the peptide insertion may be an AAV9 3-mer peptide split design or contiguous peptide insertion with a sliding window originating at any amino acid position, e.g., amino acids 586-588. As yet another non-limiting example, the peptide insertion may be an AAV9 6-mer and/or 7-mer peptide contiguous peptide insertion with a sliding window originating at any amino acid position, e.g., amino acids 585-590.

[2130] Any number of such configured peptide display capsid libraries may be pooled in a cell and/or subject, including a non-human primate (NHP) cell and/or subject, and administered to any tissue (e.g., central nervous system tissue) via any route, including but not limited to IV and/or ICM injection, at any VG/cell and/or VG/subject dose. As a non-limiting example, six configured peptide display capsid libraries are pooled and administered to the central nervous system of an NHP via intravenous administration of dose 1×10¹⁴ VG/NHP. As another non-limiting example, six libraries are pooled and administered to the central nervous system of NHP via an intraventricular administration, such as, but not limited intraventricular administration that is an intra-cisterna magna injection (ICM) of dose 2×10¹³ a VG/NHP.

### Example 2. Identification and Design of Non-Human Primate AAV Capsid Libraries

[2131] A TRACER RNA-driven library selection for increased nervous system tissue transduction in a non-human primate (NHP) is developed and carried out in accordance with methods similar, or equivalent, to those described in WO2020072683, the contents of which are herein incorporated by reference in their entirety, particularly as pertains to the TRACER method.

[2132] AAV libraries, e.g., AAV9 libraries, generated are administered by any route to NHPs at a given VG dose(s) per animal. A number of groups of NHPs are administered promoter-driven (e.g., SYN-driven or GFAP-driven) libraries derived from wild-type AAV9 flanking sequences, while other groups receive pooled libraries containing wild-type, PHP.eB-derived, or other AAV serotype sequences. After a period, RNA is extracted from a tissue, such as but not limited to spinal cord and brain tissue. The RNA preparation is subjected to mRNA enrichment. The enriched mRNA is reverse transcribed to cDNA. The cDNA is amplified. This method allows recovery of abundant amplicons from tissue samples.

[2133] Full-length capsid amplicons are used as templates for NGS library generation, as well as cloning into a DNA library for the next, or subsequent, round(s) of biopanning. Any number of rounds of AAV selection may be performed. The total number of unique capsid variants may drop by a fold amount across AAV selection rounds. Capsid libraries may be pooled or combined at any step with any other capsid libraries described herein.

[2134] Following RNA recovery and PCR amplification, a systematic enrichment analysis by NGS is performed. Capsids enrichment ratio including comparison to a benchmark and sequence convergence is evaluated.

[2135] Peptide library candidates are evaluated and optimized using any of the methods described herein and are carried out, e.g., using methods similar, or equivalent, to those described in WO2020072683, the contents of which are herein incorporated by reference in their entirety, particularly the subject matter of Examples, 8, 9, and 10. The top-ranking peptide variants are generated and transduction efficacy evaluated as described in WO2020072683, the contents of which are herein incorporated by reference in their entirety, particularly the subject matter of Examples 10, 12 and 13.

### Example 3. Identification and Design of Orthogonal Evolution AAV Capsid Libraries

[2136] This study involves the use of orthogonal evolution wherein AAV particles may be administered for a first round of AAV selection across a set of any number of cell- and/or subject-types that may be from different species and/or strains; and, wherein any number of additional, i.e., subsequent, AAV selection rounds are performed either across a set of any number of cell- and/or subject-types that may be from different species and/or strains, or across a set of any number of cell- and/or subject-types that may be from the same species and/or strains, as represented in FIG. 2.

[2137] A TRACER based RNA-driven library selection for increased nervous system tissue transduction a set of any number of cell- and/or subject-types that may be from different species and/or strain is developed and carried out in accordance with methods similar, or equivalent, to those described in WO2020072683, the contents of which are herein incorporated by reference in their entirety, particularly the subject matter of Example 7. AAV libraries, e.g., AAV9 libraries, generated are administered for a first round of AAV selection (biopanning) by any route to a non-human primate (NHP), a rodent (e.g., a rat), and/or a cell (e.g., a human brain microvascular endothelial cell, or hBMVEC) at a given VG dose(s) per subject and/or cell. A number of groups of NHPs, rodents, and/or cells are administered promoter-driven (e.g., SYN-driven or GFAP-driven) libraries derived from wild-type AAV9 sequences, while other groups receive pooled libraries containing wild-type, PHP.eB-derived, or other AAV serotype sequences. After a period, RNA is extracted from a tissue, such as but not limited to spinal cord and brain tissue. The RNA preparation is subjected to mRNA enrichment. The enriched mRNA is reverse transcribed to cDNA. The cDNA is amplified. This method allows recovery of abundant amplicons from tissue samples.

[2138] Full-length capsid amplicons are used as templates for NGS library generation, as well as cloning into DNA libraries for the next, or subsequent round(s) of biopanning. Subsequent rounds of biopanning are performed either across a set of any number of cell- and/or subject-types that may be from different species and/or strain as used in the above-described first round, or across a set of any number of cell- and/or subject-types that may be from the same species and/or strain as used in the above-described first round. Any number of rounds of selection is performed. The total number of unique capsid variants may drop by a fold amount across AAV selection rounds. Capsid libraries may be pooled or combined at any step with any other capsid libraries described herein.

[2139] Following RNA recovery and PCR amplification, a systematic enrichment analysis by NGS is performed. Capsids enrichment ratio including comparison to a benchmark and sequence convergence is evaluated.

[2140] Peptide library candidates are evaluated and optimized using any of the methods described herein and are carried out, e.g., using methods similar, or equivalent, to those described in WO2020072683, the contents of which are herein incorporated by reference in their entirety. The top-ranking peptide variants are generated and transduction efficacy evaluated as in WO2020072683.

### Example 4. NHP high-throughput screen of TRACER AAV libraries

[2141] A TRACER based method as described in WO2020072683, the contents of which are herein incorporated by reference in their entirety, was adapted for use in non-human primates (NHP). An orthogonal evolution approach (e.g., NHP and BMVEC) was combined with a high throughput screening by NGS in NHP. Briefly, AAV9 starting libraries, driven by synapsin or GFAP promoters were administered to non-human primate (NHP) intravenously for in vivo AAV selection (biopanning), performed iteratively. All libraries were injected intravenously at a dose of 1e14VG per animal (approximately 3e13 VG/kg). Orthogonally, biopanning was conducted in hBMVEC cells using the same starting libraries. In the second round of biopanning in NHP, only libraries driven by the synapsin promoter were used. After a period, (e.g., 1 month) RNA was extracted from nervous tissue, e.g., brain and spinal cord. Following RNA recovery and RT-PCR amplification, a systematic NGS enrichment analysis was performed and the peptides shown in Table 7 were identified. Capsids enrichment ratio, including calculating the ratio of, e.g., P2/P1 reads and comparison to a benchmark (e.g., AAV9) was evaluated.

[2142] Candidate library enrichment data in P3 NHP brain for the peptides identified, over benchmark AAV9, are shown in Table 7. Data are provided as fold enrichment. Fifty-one variants showed greater than 10-fold enrichment over AAV9. Variants with 0.0 enrichment over AAV9 are not included in Table 7.

TABLE 7
NHP NGSAAV9 Enrichment

| | | Fold |
|---|---|---|
| | SEQ ID | enrichment |
| Peptide Sequence | NO: | over AAV9 |
| PLNGAVHLYA | 1725 | 473.7 |
| AQARDSPKGW | 1726 | 214 |
| LTNGAVRDRP | 1727 | 134.4 |
| VQAFTHDSRG | 1728 | 88.6 |
| AQAYSTDVRM | 1729 | 84.8 |
| AQAYSTDVRI | 1730 | 83.8 |
| AQAFTAAERM | 1731 | 74.9 |
| AQTHLQIGVA | 1732 | 54.6 |
| AQSNAVLSLA | 1733 | 51.6 |
| AQAYSTDERM | 1734 | 41.4 |
| AQAYSTDVRL | 1735 | 31.7 |
| AQATVSTLRM | 1736 | 31.5 |
| AQAYSTDERK | 1737 | 31.2 |
| AQAYSTDMRM | 1738 | 30.4 |
| VVNGAVLHVA | 1739 | 29.8 |
| AQAYSTDVTM | 1740 | 29.7 |
| AQAHLQIGVA | 1741 | 23 |
| FLDPAVSSKA | 1742 | 22.6 |
| AQAYVSTLRM | 1743 | 21.9 |
| AQAQTGPPLK | 1744 | 20.1 |
| EQASRLPTPG | 1745 | 20 |
| AQASVSTMRM | 1746 | 19.7 |
| TDYSAVRLGA | 1747 | 18 |
| TQAYSTDVRM | 1748 | 17.9 |
| AQALPSNERL | 1749 | 17.4 |
| AQAYSTDVRT | 1750 | 16.4 |
| AQSSLPEMVA | 1751 | 16.2 |
| AQAGEQSTRL | 1752 | 16.1 |
| AQASNDVGRA | 1753 | 15.4 |
| AQATFTASEY | 1754 | 15.3 |
| AKAHAGTIYS | 1755 | 14.9 |
| AQARTIDQCC | 1756 | 14.8 |
| AQEYNSNPKA | 1757 | 14.5 |
| AQVVDNSTHA | 1758 | 14.5 |
| AQATLSVPLK | 1759 | 14.4 |
| AQIVMNSLKA | 1760 | 12.5 |
| AQATMSQTMA | 1761 | 12.5 |
| AQALTQDERW | 1762 | 12 |
| AQAQLSTLRP | 1763 | 11.6 |
| AQVVMGISVA | 1764 | 11.4 |
| AQAYTTDVRM | 1765 | 11.4 |
| AQHIDSMRPP | 1766 | 11.3 |
| AQASTGTLRL | 1767 | 11.1 |
| AQHRALDYYA | 1768 | 11 |
| AQARESPRGL | 1769 | 10.9 |
| AQALLAGTRV | 1770 | 10.7 |
| TKIQAVPWNA | 1771 | 10.7 |
| AQASLSSTRP | 1772 | 10.6 |
| AQAMGSRSDQ | 1773 | 10.4 |
| AQAAQGTYRG | 1774 | 10.3 |
| SQENAVFSKA | 1775 | 10.3 |
| AQALSLSTRP | 1776 | 9.8 |
| AQAAAGTLRD | 1777 | 9.7 |
| AQASRLPTPG | 1778 | 9.5 |
| AQAGSLSERG | 1779 | 9.5 |
| AQSKGDGFTA | 1780 | 9.4 |
| GAGTAVTATA | 1781 | 9.3 |
| AQAQGSSSVG | 1782 | 8.8 |
| AQAYSTDARM | 1783 | 8.8 |
| ERAHAVTGLA | 1784 | 8.5 |
| AQAYGLPKGP | 1785 | 8.4 |
| AQAYSTEVRM | 1786 | 8.4 |
| AQAGVSTALH | 1787 | 8.2 |
| AQSYSTDVRM | 1788 | 8.1 |
| AQPLMSHTDA | 1789 | 7.9 |
| AQAAALASRP | 1790 | 7.9 |
| AQAAITSTIS | 1791 | 7.8 |
| AQPANDGLRA | 1792 | 7.5 |
| AQDYSTDVRM | 1793 | 7.4 |
| AQATLGYSTA | 1794 | 7.4 |
| AQATLGTIRV | 1795 | 7.3 |
| AQAGASDMVH | 1796 | 7 |
| AQAVSGTVRS | 1797 | 6.9 |
| GGTLAVVSLA | 1798 | 6.9 |
| AQAYSADVRM | 1799 | 6.8 |
| AQAFAMPKGL | 1800 | 6.6 |
| AQALVSTSRP | 1801 | 6.6 |
| AQASFQQAST | 1802 | 6.6 |
| AQAMTGNDRS | 1803 | 6.3 |
| AQASTQSPPG | 1804 | 6.1 |
| NARSAVESLA | 1805 | 6.1 |
| AQITVSHTTA | 1806 | 6 |
| AQALAGYDKA | 1807 | 6 |
| AQSTSHDTRA | 1808 | 5.9 |
| AQAIQDRTVV | 1809 | 5.8 |
| AQSKTTLTLA | 1810 | 5.7 |
| AQASMGTVRL | 1811 | 5.7 |
| AQHSDTLTRA | 1812 | 5.5 |
| AQKEMYTSVA | 1813 | 5.5 |
| AQASPSQPLL | 1814 | 5.4 |
| AQAYAGTIYS | 1815 | 5.3 |
| AQARSLEPVI | 1816 | 5.3 |
| TQAGVSTAVH | 1817 | 5.2 |
| AQNTLSLSLA | 1818 | 5.2 |
| AQAYVSSVKM | 1819 | 5.2 |
| AQAATSPRLG | 1820 | 5.1 |
| GYLTAVQPQA | 1821 | 5 |
| LNNLAVGMTA | 1822 | 5 |
| AQTVSVHVRA | 1823 | 5 |
| AQINGLVTTA | 1824 | 4.9 |
| AQAAITTTIS | 1825 | 4.8 |
| AQASTFVTTI | 1826 | 4.7 |
| AQALYDNVPL | 1827 | 4.6 |
| AQAAAGTWKG | 1828 | 4.6 |
| AQATTGTLRS | 1829 | 4.6 |
| GQYAADSSYA | 1830 | 4.5 |
| AQAGIATVRT | 1831 | 4.5 |
| AQALGHELRA | 1832 | 4.5 |
| AQAREAIPQG | 1833 | 4.4 |
| AQAMSGTLRM | 1834 | 4.4 |
| AQAVDRVRPP | 1835 | 4.4 |
| AQAPVNNDRG | 1836 | 4.3 |
| AQAQQVAGTM | 1837 | 4.3 |
| AQAEPRDTRA | 1838 | 4.3 |
| AQRLSEQGVA | 1839 | 4.2 |
| AQASEGIQLS | 1840 | 4.1 |
| AQRQGPDPLA | 1841 | 4.1 |
| AQVTLGSAKA | 1842 | 4.1 |
| AQAGASLGLA | 1843 | 4 |
| AQAFTQDERW | 1844 | 4 |
| AQASQTTVRS | 1845 | 4 |
| AQARVSSNGV | 1846 | 3.9 |
| AQGPLSGLRA | 1847 | 3.9 |
| AQAYGGQSLG | 1848 | 3.9 |
| AQANLGTVRQ | 1849 | 3.9 |
| AQARSDTRGL | 1850 | 3.8 |
| AQAGSDGPRL | 1851 | 3.8 |
| TDGAAVVMRA | 1852 | 3.8 |
| SGITAVPLHA | 1853 | 3.8 |
| AQAAAVGHLP | 1854 | 3.7 |
| AQRVEPKWIA | 1855 | 3.7 |
| AQAVASSPYA | 1856 | 3.7 |
| TQYGAVEGQD | 1857 | 3.7 |
| AQAKSHTLEG | 1858 | 3.6 |
| AQTHLQIVVA | 1859 | 3.6 |
| AQKNEHGMLA | 1860 | 3.6 |
| AQITVSHTRA | 1861 | 3.6 |
| AQARLAPKGL | 1862 | 3.6 |
| KTPGAVSTTA | 1863 | 3.6 |
| AQAFSGTIKS | 1864 | 3.6 |
| PLNGAVNLYA | 1865 | 3.5 |
| AQALTQDERC | 1866 | 3.5 |
| AQATAQVQRS | 1867 | 3.4 |
| AQTPALINLA | 1868 | 3.4 |
| AQASDRSPLL | 1869 | 3.4 |
| AQITVSHTMA | 1870 | 3.3 |
| AQATGTHLMG | 1871 | 3.3 |
| LDGGAVVVTA | 1872 | 3.3 |
| LTNGAVRDRA | 1873 | 3.2 |
| AQARGSDLRD | 1874 | 3.2 |
| AQATFGTQRI | 1875 | 3.2 |
| AQALPQTNRP | 1876 | 3.1 |
| AQARSNDPVL | 1877 | 3.1 |
| AQAYLAVQNG | 1878 | 3.1 |
| AQATQSTLRP | 1879 | 3.1 |
| AQALGGFGPQ | 1880 | 3.1 |
| LVGQAVGSRA | 1881 | 3.1 |
| AQSIANVVVA | 1882 | 3 |
| AQASPSVSRP | 1883 | 3 |
| AQTVVVSTTA | 1884 | 3 |
| VKEQAVSVMA | 1885 | 3 |
| AQQATGTFRA | 1886 | 3 |
| AQAQGSSSGG | 1887 | 3 |
| AQAHAVGPQG | 1888 | 3 |
| AQRLETKETA | 1889 | 3 |
| AQLAQGIGVA | 1890 | 3 |
| AQAVQSSFTI | 1891 | 3 |
| AQATYTASEY | 1892 | 2.9 |
| AQTSSQNLKA | 1893 | 2.9 |
| AQLVPSVAMA | 1894 | 2.9 |
| AQASPSAFAG | 1895 | 2.9 |
| AQALALVSAS | 1896 | 2.9 |
| AQASVGTTYT | 1897 | 2.9 |
| AQARVSSSGT | 1898 | 2.9 |
| NSMGAVLGAA | 1899 | 2.9 |
| AQHTDTLTRA | 1900 | 2.9 |
| AQPNLQPRGA | 1901 | 2.8 |
| AQADRHSSIV | 1902 | 2.8 |
| SPSVAVPSQA | 1903 | 2.8 |
| AQPGIVSTIA | 1904 | 2.8 |
| AQAQHSVGLP | 1905 | 2.7 |
| AQTNSGAILA | 1906 | 2.7 |
| AQDSYDVGRA | 1907 | 2.7 |
| EQAQGSSSVG | 1908 | 2.7 |
| AQAGVSTAVQ | 1909 | 2.7 |
| AQARDMLPLQ | 1910 | 2.7 |
| AQAMVGTLRG | 1911 | 2.7 |
| AQPNVVSTLA | 1912 | 2.7 |
| AQAGHVVTSD | 1913 | 2.7 |
| AQAYTTDERM | 1914 | 2.7 |
| TAVSAVQVMA | 1915 | 2.6 |
| AQAAAGTLRV | 1916 | 2.6 |
| VSNEAVHARA | 1917 | 2.6 |
| AQVLPQSLSA | 1918 | 2.6 |
| AQASVSTLRM | 1919 | 2.6 |
| AQAGLLLSVA | 1920 | 2.5 |
| AQANLVTGPL | 1921 | 2.5 |
| AQASQHSSMA | 1922 | 2.5 |
| GYSSAVSSVA | 1923 | 2.5 |
| AQVGVSPAVA | 1924 | 2.5 |
| DGTLAVPFKA | 1925 | 2.5 |
| AQAPPTSTAM | 1926 | 2.5 |
| AQATPANVRG | 1927 | 2.5 |
| AQAGSSNFLS | 1928 | 2.5 |
| AQLLAQDIRA | 1929 | 2.5 |
| AQPSSDGYRA | 1930 | 2.5 |
| AQALIGTLRT | 1931 | 2.5 |
| SVHGAVGILA | 1932 | 2.5 |
| AQPYVVSGAA | 1933 | 2.4 |
| AQWTHNITAA | 1934 | 2.4 |
| PTNAAVRTNA | 1935 | 2.4 |
| AHAYSTDVRM | 1936 | 2.4 |
| PLAAAVGMKA | 1937 | 2.4 |
| AQARDNSVML | 1938 | 2.4 |
| AQAQFPRNGG | 1939 | 2.4 |
| GALNAVNGVA | 1940 | 2.4 |
| AQASHQQGVP | 1941 | 2.4 |
| SYQSAVVPQA | 1942 | 2.3 |
| AQSIMGTIRA | 1943 | 2.3 |
| AQAYVSQAQG | 1944 | 2.3 |
| AQATGNQAHF | 1945 | 2.3 |
| AQVTVGTPIA | 1946 | 2.3 |
| AQAQTSTFRG | 1947 | 2.3 |
| SVHMAVTVSA | 1948 | 2.2 |
| AQAQSTLNLG | 1949 | 2.2 |
| AQDQTGPPLK | 1950 | 2.2 |
| HLAHAVSTAA | 1951 | 2.2 |
| AQALARDSSF | 1952 | 2.2 |
| AQLLSGTLKA | 1953 | 2.2 |
| AQASLLPTPG | 1954 | 2.2 |
| AQPMAGQSTA | 1955 | 2.2 |
| AQARSLEPDI | 1956 | 2.2 |
| AQFVTGNQDA | 1957 | 2.2 |
| AQATFKTSVP | 1958 | 2.1 |
| LNARAVEGPA | 1959 | 2.1 |
| AQALPNSGRP | 1960 | 2.1 |
| AQALNGSPEA | 1961 | 2.1 |
| AQATSLHPLP | 1962 | 2 |
| AQAVQPPLKN | 1963 | 2 |
| AQAMLSGTRI | 1964 | 2 |
| AQHVDLASKA | 1965 | 2 |
| AQASFATMRP | 1966 | 2 |
| AQAMPLNARS | 1967 | 2 |
| AQALVGQMRG | 1968 | 2 |
| VVNGAVLHLA | 1969 | 2 |
| AQAQTAPPLK | 1970 | 2 |
| AQGHGDLHRA | 1971 | 2 |
| AQAADRSPVH | 1972 | 2 |
| GALNAVTGVA | 1973 | 2 |
| AQAERMASLG | 1974 | 1.9 |
| AQAPPTTTRL | 1975 | 1.9 |
| AQAAVGQTLA | 1976 | 1.9 |
| AQSLGTGMHA | 1977 | 1.9 |
| AQSLGSPALA | 1978 | 1.9 |
| AQASVSVTRP | 1979 | 1.9 |
| AQATMSHTMA | 1980 | 1.9 |
| AQAVQSLTVG | 1981 | 1.9 |
| AQSQTGTYRA | 1982 | 1.9 |
| AQSLASVYAA | 1983 | 1.9 |
| STKLAVHEQA | 1984 | 1.9 |
| AQSHLFPTPA | 1985 | 1.9 |
| AQGTWSSSEA | 1986 | 1.9 |
| AQTPQGLTKA | 1987 | 1.9 |
| AQVSLGTQYA | 1988 | 1.9 |
| AQDSRLPTPG | 1989 | 1.8 |
| ASIQAVGVKA | 1990 | 1.8 |
| AQATMSEQRL | 1991 | 1.8 |
| TAQAAVQGMA | 1992 | 1.8 |
| AQAFNAAERM | 1993 | 1.8 |
| AQINFLSGVA | 1994 | 1.8 |
| PQHLAVSSEA | 1995 | 1.8 |
| AQALGNFPAV | 1996 | 1.8 |
| AQANASTVRV | 1997 | 1.8 |
| AQRIVDLTTA | 1998 | 1.8 |
| VRQVAVEGVA | 1999 | 1.8 |
| AQAPASSQKL | 2000 | 1.8 |
| AQQIDSMRPA | 2001 | 1.7 |
| AQAHGTSSLF | 2002 | 1.7 |
| AQVNSGIALA | 2003 | 1.7 |
| AQLHLAETRA | 2004 | 1.7 |
| AQALTHDERW | 2005 | 1.7 |
| NTVRAVIMEA | 2006 | 1.7 |
| AQAYVAGSRP | 2007 | 1.7 |
| AQDRAFVVSA | 2008 | 1.7 |
| AQAQEKQVFS | 2009 | 1.7 |
| AQACVSTAVH | 2010 | 1.7 |
| AQAFTHDSRG | 2011 | 1.7 |
| AQASHQGTVG | 2012 | 1.7 |
| AQAVLVTEQG | 2013 | 1.7 |
| AQAVVSTAVH | 2014 | 1.7 |
| AQATSRETKG | 2015 | 1.7 |
| YQQPAVSSRA | 2016 | 1.6 |
| AQANMGLSLS | 2017 | 1.6 |
| AQWTSSMSEA | 2018 | 1.6 |
| AQASISIMST | 2019 | 1.6 |
| AQASVAPLTC | 2020 | 1.6 |
| AQLVTVEKQA | 2021 | 1.6 |
| AQAATAGEKL | 2022 | 1.6 |
| AQALSHGPGG | 2023 | 1.6 |
| AQSNAHIEIA | 2024 | 1.6 |
| AQARSSSTGI | 2025 | 1.6 |
| AQAVGGDVTR | 2026 | 1.6 |
| AQAPRTVYQG | 2027 | 1.6 |
| AQALHNLGPA | 2028 | 1.6 |
| VRMGAVSDNA | 2029 | 1.6 |
| AQAFRTSQFT | 2030 | 1.6 |
| AQSSATMQRA | 2031 | 1.5 |
| AQTLAETYRA | 2032 | 1.5 |
| AQANGSIVLN | 2033 | 1.5 |
| AQARVADQLP | 2034 | 1.5 |
| AQAVKQGLYE | 2035 | 1.5 |
| AQAFSDGLKS | 2036 | 1.5 |
| AQVSVTPVKA | 2037 | 1.5 |
| VNGRAVSMMA | 2038 | 1.5 |
| SLVGAVAQMA | 2039 | 1.5 |
| AQARVSPVGL | 2040 | 1.5 |
| AQSNTTLTLA | 2041 | 1.5 |
| AQTSTEHLRA | 2042 | 1.5 |
| AQAGMGINLP | 2043 | 1.5 |
| AQANAHSLTL | 2044 | 1.5 |
| AQARFTTTEM | 2045 | 1.5 |
| AQLGYQEVKA | 2046 | 1.4 |
| AQAGQHASVF | 2047 | 1.4 |
| AQATGSNPRG | 2048 | 1.4 |
| AQAPVSPSIP | 2049 | 1.4 |
| AQTTLGVGTA | 2050 | 1.4 |
| AQASHLVSLA | 2051 | 1.4 |
| AQAPLTGLSV | 2052 | 1.4 |
| AQVSTSTLRA | 2053 | 1.4 |
| AQVQLGTLKA | 2054 | 1.4 |
| AQAHVSVSER | 2055 | 1.4 |
| AQLLLSGQTA | 2056 | 1.4 |
| TTSSAVLTPA | 2057 | 1.4 |
| AQFGADTVNA | 2058 | 1.4 |
| AQTFSSDNLA | 2059 | 1.4 |
| AQIHPANSRA | 2060 | 1.4 |
| AQSIGQFPVA | 2061 | 1.3 |
| AQVISPENLA | 2062 | 1.3 |
| AQALSAISAT | 2063 | 1.3 |
| AQAGVSASQM | 2064 | 1.3 |
| AQASTKTPLP | 2065 | 1.3 |
| AQAPPSTTAM | 2066 | 1.3 |
| AQAVSSDRMH | 2067 | 1.3 |
| AQAGSVTMRL | 2068 | 1.3 |
| AQAVLLGGAV | 2069 | 1.3 |
| AQAQRDMVTT | 2070 | 1.3 |
| AQAHHGSSLG | 2071 | 1.3 |
| VLSSAVGQRA | 2072 | 1.3 |
| AQAAGSVLLG | 2073 | 1.3 |
| AQAYPTDVRM | 2074 | 1.3 |
| AQWSRDAQSA | 2075 | 1.3 |
| AQQGLDMGRA | 2076 | 1.3 |
| AQAAQNHALV | 2077 | 1.3 |
| AQRSQIVEVA | 2078 | 1.3 |
| AQMSDVSGRA | 2079 | 1.3 |
| AKALTQDERW | 2080 | 1.3 |
| AQAVSSSTLT | 2081 | 1.3 |
| AQPSRLPTPG | 2082 | 1.3 |
| RTSTAVLDFA | 2083 | 1.3 |
| AQDLSSSIRA | 2084 | 1.3 |
| AQLLDGLTSA | 2085 | 1.3 |
| AQALIGLSKP | 2086 | 1.3 |
| AQASGTVRPP | 2087 | 1.2 |
| AQLLDTRYKA | 2088 | 1.2 |
| AQAPNTSFTA | 2089 | 1.2 |
| AQTHLQIGVD | 2090 | 1.2 |
| AQRLDTSQVA | 2091 | 1.2 |
| AQRTQDTLSA | 2092 | 1.2 |
| AQADIQSHAL | 2093 | 1.2 |
| PNMNAVGIKA | 2094 | 1.2 |
| AQAGVSTAVH | 2095 | 1.2 |
| AQASGKTFIG | 2096 | 1.2 |
| AQAGVQSTRL | 2097 | 1.2 |
| AQAQGAYPLV | 2098 | 1.2 |
| AQPYSTDVRM | 2099 | 1.2 |
| SSSVAVVTLA | 2100 | 1.2 |
| AQTYNGLNKA | 2101 | 1.2 |
| AQASVSKLRM | 2102 | 1.2 |
| AQRGSENEKA | 2103 | 1.2 |
| PITNAVLKTA | 2104 | 1.2 |
| TNSYAVSSPA | 2105 | 1.2 |
| PYQTAVAGAA | 2106 | 1.1 |
| GPALAVLGRA | 2107 | 1.1 |
| LSISAVPAKA | 2108 | 1.1 |
| AQTLGPLPHA | 2109 | 1.1 |
| AQAQQPLAHV | 2110 | 1.1 |
| AQTDGAWSKA | 2111 | 1.1 |
| AQALSGPPSI | 2112 | 1.1 |
| AQASSPSTRG | 2113 | 1.1 |
| AQASLASNRP | 2114 | 1.1 |
| AQNMALSTVA | 2115 | 1.1 |
| AQHSDTMTRA | 2116 | 1.1 |
| AQAMPRYPPL | 2117 | 1.1 |
| AQHIDSMSPA | 2118 | 1.1 |
| AQALPGTSRV | 2119 | 1.1 |
| AQAKSTQDVQ | 2120 | 1.1 |
| AQPLVSASKA | 2121 | 1.1 |
| AQAMSGTLRK | 2122 | 1.1 |
| AQTLILGAHA | 2123 | 1.1 |
| AQAGQARSQG | 2124 | 1.1 |
| AQRKDLSLVA | 2125 | 1.1 |
| AQALSAPMSL | 2126 | 1.1 |
| TNSLAVGMRA | 2127 | 1.1 |
| AQAPIGTVRP | 2128 | 1.1 |
| FIQAAVSSSA | 2129 | 1.1 |
| AQAEKPTHLL | 2130 | 1.1 |
| AQALSGDTTR | 2131 | 1.1 |
| AQAYIASGGT | 2132 | 1.1 |
| QLNQAVGTLA | 2133 | 1.1 |
| AQASGALDRP | 2134 | 1.1 |
| AQAQDTALRA | 2135 | 1.1 |
| AQAQAGMARG | 2136 | 1.1 |
| AQAQGSSAVG | 2137 | 1.1 |
| AQLLRDIGPA | 2138 | 1.1 |
| VDRGAVTQMA | 2139 | 1.1 |
| AQAVNVSKGS | 2140 | 1.1 |
| SVNTAVESLA | 2141 | 1.1 |
| AQARLPHTSS | 2142 | 1.1 |
| AQRNGSEVVA | 2143 | 1.1 |
| AQATDRVDRP | 2144 | 1.1 |
| AQASLSRERT | 2145 | 1.1 |
| AQAYSTHVRM | 2146 | 1.1 |
| AQHLSAGPTA | 2147 | 1.1 |
| LNGGAVSLRA | 2148 | 1 |
| AQAYGVSSVT | 2149 | 1 |
| AQFGSAVQLA | 2150 | 1 |
| AQAPPTSTRL | 2151 | 1 |
| AQVSTNWPKA | 2152 | 1 |
| AQTSTDLSRA | 2153 | 1 |
| AQAHSTDVRM | 2154 | 1 |
| AQATLTGHVS | 2155 | 1 |
| AQATTQGALT | 2156 | 1 |
| AQAAKASDRT | 2157 | 1 |
| AQGNEHGGRA | 2158 | 1 |
| AQALSTSLLL | 2159 | 1 |
| AQASLGSTYL | 2160 | 1 |
| AQAFSTVGAV | 2161 | 1 |
| AQLNGLVTTA | 2162 | 1 |
| AQASVRTLRM | 2163 | 1 |
| AQATMSRPWQ | 2164 | 1 |
| AQSSLPAMVA | 2165 | 1 |
| RETVAVGQYA | 2166 | 1 |
| AQAFGSEGRS | 2167 | 1 |
| SSGTAVEHRA | 2168 | 1 |
| FGTNAVIPRA | 2169 | 1 |
| AQAGQARSLG | 2170 | 1 |
| AQSFSSDNMA | 2171 | 1 |
| AQMNGLTGKA | 2172 | 1 |
| AQQNGKQHLA | 2173 | 1 |
| AQHIDSIRPA | 2174 | 1 |
| AQAADRLSTL | 2175 | 1 |
| AQFGLKDIRA | 2176 | 1 |
| AQAHQGGATL | 2177 | 1 |
| AQATYNSPKP | 2178 | 1 |
| AQAMSNMLRN | 2179 | 0.9 |
| VPISAVMSTA | 2180 | 0.9 |
| AQHSLGNTVA | 2181 | 0.9 |
| AQATSALSRL | 2182 | 0.9 |
| AQADRQTFPV | 2183 | 0.9 |
| AQAVNSMSIG | 2184 | 0.9 |
| AQALAIVSKN | 2185 | 0.9 |
| AQGQLQERFA | 2186 | 0.9 |
| AQFNGASAHA | 2187 | 0.9 |
| AQLGGQSPVA | 2188 | 0.9 |
| AQANGAYTDN | 2189 | 0.9 |
| AQNLSSSEPA | 2190 | 0.9 |
| AQSAIVLTTA | 2191 | 0.9 |
| ITRSAVPDVA | 2192 | 0.9 |
| GALKAVTGVA | 2193 | 0.9 |
| AQAVGQDYLR | 2194 | 0.9 |
| AQVTLNTPLA | 2195 | 0.9 |
| AQALTQDDRW | 2196 | 0.9 |
| AQAYSTNVRM | 2197 | 0.9 |
| AQAVAAPASL | 2198 | 0.9 |
| AQANPVSIMS | 2199 | 0.9 |
| AQASMQAVKD | 2200 | 0.9 |
| AQAVGGHSVA | 2201 | 0.9 |
| AQAVAASTRL | 2202 | 0.9 |
| GGTHAVSSFA | 2203 | 0.9 |
| AQAADSSGFR | 2204 | 0.9 |
| AQQSHVPQTA | 2205 | 0.9 |
| AQARVGNTNV | 2206 | 0.9 |
| AQTVSYSDLA | 2207 | 0.9 |
| AQAEHGLARS | 2208 | 0.9 |
| AQASNYPVAA | 2209 | 0.9 |
| VLLSAVGMAA | 2210 | 0.9 |
| AQALSGQNRG | 2211 | 0.9 |
| AQAWGQETRQ | 2212 | 0.9 |
| AQGYSTDVRM | 2213 | 0.9 |
| AQAGSVMSRE | 2214 | 0.8 |
| AQAGSLSARG | 2215 | 0.8 |
| AQATALAPKS | 2216 | 0.8 |
| AQAIRQNGSS | 2217 | 0.8 |
| AQLQDNLQLA | 2218 | 0.8 |
| AKAYSTDVRM | 2219 | 0.8 |
| AQSVDRTLLA | 2220 | 0.8 |
| AQAGQNSRLP | 2221 | 0.8 |
| AQTNLQPRGA | 2222 | 0.8 |
| PNTIAVGQRA | 2223 | 0.8 |
| AQAHATLSLS | 2224 | 0.8 |
| NHLRAVGSPA | 2225 | 0.8 |
| AQETDRNLRA | 2226 | 0.8 |
| AQARAETSGS | 2227 | 0.8 |
| AQHRELDSYA | 2228 | 0.8 |
| AQRHTSDVLA | 2229 | 0.8 |
| AQVGQTSSWA | 2230 | 0.8 |
| AQANSAALLM | 2231 | 0.8 |
| AQAIIERTAT | 2232 | 0.8 |
| AQSSRYEEKA | 2233 | 0.8 |
| QATGAVNPRA | 2234 | 0.8 |
| AQASYSVSVG | 2235 | 0.8 |
| AQQGHTVNNA | 2236 | 0.8 |
| AQASLPISTR | 2237 | 0.8 |
| AQHIDSMRPT | 2238 | 0.8 |
| AQAQDTENMR | 2239 | 0.8 |
| RTGAAVTGAA | 2240 | 0.8 |
| AQASSVRGMG | 2241 | 0.8 |
| AQPGIESTIA | 2242 | 0.8 |
| AQHVDLDSKA | 2243 | 0.8 |
| AQATTVPALG | 2244 | 0.8 |
| AQVNPTPQKA | 2245 | 0.8 |
| AQAGYISSAS | 2246 | 0.8 |
| AQTLILGDPA | 2247 | 0.8 |
| AQAASGLTMM | 2248 | 0.8 |
| AQALERPPSG | 2249 | 0.8 |
| TTYDAVHSKA | 2250 | 0.8 |
| AQAMLDSANG | 2251 | 0.7 |
| AQAMHQTDKF | 2252 | 0.7 |
| KSTVAVQSVA | 2253 | 0.7 |
| AQATAGTLIG | 2254 | 0.7 |
| GLKSAVTHVA | 2255 | 0.7 |
| AQAHSAYQGA | 2256 | 0.7 |
| AQSFSSDNLA | 2257 | 0.7 |
| AQLNMAASVA | 2258 | 0.7 |
| AQFSQAYNAA | 2259 | 0.7 |
| AQHLTAGLRA | 2260 | 0.7 |
| AQAHTVSPHL | 2261 | 0.7 |
| GILGAVLPRA | 2262 | 0.7 |
| AQHNSSSLLA | 2263 | 0.7 |
| AQAPQVAGTM | 2264 | 0.7 |
| AQHQDSRPMA | 2265 | 0.7 |
| AQRFQETGLA | 2266 | 0.7 |
| AQLTVSHTRA | 2267 | 0.7 |
| AQANLRTTMG | 2268 | 0.7 |
| AQAGLRDPRM | 2269 | 0.7 |
| AQHLLHGTAA | 2270 | 0.7 |
| RNQGAVASLA | 2271 | 0.7 |
| AQAGSSSVTW | 2272 | 0.7 |
| AQPHLQIGVA | 2273 | 0.7 |
| AQANSGAVLA | 2274 | 0.7 |
| AQLLGDAVKA | 2275 | 0.7 |
| SSGNAVSSLA | 2276 | 0.7 |
| AQVSVTMALA | 2277 | 0.7 |
| AQYHTRGFAA | 2278 | 0.7 |
| AQSTTKGTLA | 2279 | 0.7 |
| AQAQPPSARY | 2280 | 0.7 |
| AQAGLQGTAA | 2281 | 0.7 |
| AQPQGSSTFA | 2282 | 0.7 |
| TQYRAVEGQA | 2283 | 0.7 |
| AQAISTQLAG | 2284 | 0.7 |
| AQLGSNISHA | 2285 | 0.7 |
| AQTGLSGTVA | 2286 | 0.7 |
| AQRVDSSGRA | 2287 | 0.7 |
| AQAGLALNPN | 2288 | 0.7 |
| AQFYSDNSLA | 2289 | 0.7 |
| AQAVGAPQRL | 2290 | 0.7 |
| AQASYDDGRA | 2291 | 0.7 |
| SSFAAVATAA | 2292 | 0.6 |
| AQSTLSMPLA | 2293 | 0.6 |
| AQASLHAPRP | 2294 | 0.6 |
| HAVAAVSYPA | 2295 | 0.6 |
| AQTSPVMVQA | 2296 | 0.6 |
| AQADITSTIS | 2297 | 0.6 |
| AQAAGVAMLY | 2298 | 0.6 |
| AQASVSTLRK | 2299 | 0.6 |
| MDLKAVSSRA | 2300 | 0.6 |
| AQASLSTLRM | 2301 | 0.6 |
| AQPRSPLPMA | 2302 | 0.6 |
| GQYADVSSYA | 2303 | 0.6 |
| LVGGAVVVPA | 2304 | 0.6 |
| AQAQSARPLA | 2305 | 0.6 |
| AQSLHPSTTA | 2306 | 0.6 |
| AQFQTDLSRA | 2307 | 0.6 |
| RTELAVGLSA | 2308 | 0.6 |
| AQVVDNSPLA | 2309 | 0.6 |
| AQAVSSDSMH | 2310 | 0.6 |
| AQASPALHTL | 2311 | 0.6 |
| GQYAAVASYA | 2312 | 0.6 |
| AQLWQSRVDA | 2313 | 0.6 |
| GTFSAVQSTA | 2314 | 0.6 |
| AQAILSTIEV | 2315 | 0.6 |
| AQNVVSTLRA | 2316 | 0.6 |
| AQAMLAVSPG | 2317 | 0.6 |
| AQATDSLVAR | 2318 | 0.6 |
| AQASPQSSHG | 2319 | 0.6 |
| AQATPVHDTL | 2320 | 0.6 |
| LRSSAVGTAA | 2321 | 0.6 |
| MGRGAVLDTA | 2322 | 0.6 |
| AQSHLIPTPA | 2323 | 0.6 |
| AQAVLKAPIN | 2324 | 0.6 |
| AQKIAPAFLA | 2325 | 0.6 |
| AGNVAVLPHA | 2326 | 0.6 |
| AQSLGTGLHD | 2327 | 0.6 |
| AQAHAMSSRP | 2328 | 0.6 |
| AQQGKFDMRA | 2329 | 0.6 |
| AQALSGDGTR | 2330 | 0.6 |
| AQTHLQIAVA | 2331 | 0.6 |
| AQRTQGSSWA | 2332 | 0.6 |
| AIGSAVDLRA | 2333 | 0.6 |
| AQAQLASGTL | 2334 | 0.6 |
| AQALVSAGAL | 2335 | 0.6 |
| AQATESVPLK | 2336 | 0.6 |
| AQVYNSNPKA | 2337 | 0.6 |
| AQRTTYPSSA | 2338 | 0.6 |
| AQAMFQQAST | 2339 | 0.6 |
| AQPDALVIRA | 2340 | 0.6 |
| AQARDISMRG | 2341 | 0.6 |
| AQMSFGSTLA | 2342 | 0.6 |
| RLLSAVDQQA | 2343 | 0.6 |
| AQTTRSIENA | 2344 | 0.6 |
| AQVSDFSSRA | 2345 | 0.5 |
| AQAHSRVNTE | 2346 | 0.5 |
| AQAYSTDLRM | 2347 | 0.5 |
| AQALNGSAYS | 2348 | 0.5 |
| TQYGAVEAQA | 2349 | 0.5 |
| AQAHAGTIYS | 2350 | 0.5 |
| AQDPHSMRPA | 2351 | 0.5 |
| AQASANIHSS | 2352 | 0.5 |
| AQASLQAVSM | 2353 | 0.5 |
| AQSSHPAMVA | 2354 | 0.5 |
| AQANLQPRGA | 2355 | 0.5 |
| AQAVGSSPRG | 2356 | 0.5 |
| AQTSAPSALA | 2357 | 0.5 |
| AQAVQLQNRG | 2358 | 0.5 |
| AQAQGSGMVS | 2359 | 0.5 |
| AQAYPSSKSG | 2360 | 0.5 |
| AQAVSDYGRG | 2361 | 0.5 |
| AQMSLGATRA | 2362 | 0.5 |
| AQAFLNSASA | 2363 | 0.5 |
| AQALPSNARL | 2364 | 0.5 |
| AQANVSVRRE | 2365 | 0.5 |
| AQAGASVMVH | 2366 | 0.5 |
| AQSLAKDQSA | 2367 | 0.5 |
| AQILSALSSA | 2368 | 0.5 |
| AQSVHLSLAA | 2369 | 0.5 |
| AQALSASSFL | 2370 | 0.5 |
| AQTSQLNQTA | 2371 | 0.5 |
| AQSNLFPTPA | 2372 | 0.5 |
| AQAHGRSFDT | 2373 | 0.5 |
| AQLGSNTILA | 2374 | 0.5 |
| AQASMNSAKA | 2375 | 0.5 |
| AQRQAVEQSA | 2376 | 0.5 |
| AQASTGTLRH | 2377 | 0.5 |
| AQGPTYPNVA | 2378 | 0.5 |
| AQAGPTTSKA | 2379 | 0.5 |
| AQATTYRGMA | 2380 | 0.5 |
| AQVTNRGMPA | 2381 | 0.5 |
| AQAISGQAAW | 2382 | 0.5 |
| AQAFRGEDKG | 2383 | 0.5 |
| AQQSMPRFVA | 2384 | 0.5 |
| AQAGVKSTRL | 2385 | 0.5 |
| AQATGSILLA | 2386 | 0.5 |
| AQASGHSSFS | 2387 | 0.5 |
| AQTANDGLRA | 2388 | 0.5 |
| AQASQLALLA | 2389 | 0.5 |
| AQLVDRVPRA | 2390 | 0.5 |
| AQHSNGYVHA | 2391 | 0.5 |
| AQAAPSSSDS | 2392 | 0.5 |
| AQAMQRSSSA | 2393 | 0.5 |
| AQAASGRPTC | 2394 | 0.5 |
| AQPRPGDSRA | 2395 | 0.5 |
| AQRDRANGIA | 2396 | 0.5 |
| AQVLAISLSA | 2397 | 0.5 |
| AQAGMRDPRM | 2398 | 0.5 |
| AQASSNSSRA | 2399 | 0.5 |
| MHRDAVSGVA | 2400 | 0.5 |
| AQAEMKNMPP | 2401 | 0.5 |
| AQSGSLLASA | 2402 | 0.5 |
| AQAFASQSRG | 2403 | 0.5 |
| AQALHLPTLQ | 2404 | 0.5 |
| AQAKTGGMNT | 2405 | 0.5 |
| ISLNAVSGKA | 2406 | 0.5 |
| AQGVHGHYVA | 2407 | 0.5 |
| AQAYSKDVRM | 2408 | 0.5 |
| VPSIAVSSHA | 2409 | 0.5 |
| AQSSRHDDLA | 2410 | 0.5 |
| AQANGSGSRG | 2411 | 0.5 |
| AQVGIADRRA | 2412 | 0.5 |
| AQARGMESML | 2413 | 0.5 |
| AQAGVSTAGH | 2414 | 0.5 |
| AQVSTRNLIA | 2415 | 0.5 |
| AQAVPRLTAG | 2416 | 0.5 |
| AQRHMELQEA | 2417 | 0.5 |
| SQSRAVVWEA | 2418 | 0.5 |
| QSHTAVSSLA | 2419 | 0.5 |
| AKASVSTLRM | 2420 | 0.5 |
| AQASGSSQWA | 2421 | 0.5 |
| AQPNAQYMKA | 2422 | 0.5 |
| AQAMGTGSSL | 2423 | 0.5 |
| AQAFSTSQLT | 2424 | 0.5 |
| AQAKDQSQRL | 2425 | 0.4 |
| AQVGGNGSRA | 2426 | 0.4 |
| AQANGASRAV | 2427 | 0.4 |
| QVNKAVLDFA | 2428 | 0.4 |
| AQETLSSTRA | 2429 | 0.4 |
| GVYGAVHSSA | 2430 | 0.4 |
| AQTITIENVA | 2431 | 0.4 |
| AQALMKIADG | 2432 | 0.4 |
| AQANVSLQAA | 2433 | 0.4 |
| AQSTTSHLRA | 2434 | 0.4 |
| AQLSNLVSVA | 2435 | 0.4 |
| AQANSTPTRQ | 2436 | 0.4 |
| AQQRGDRAAA | 2437 | 0.4 |
| AQARLGQSVG | 2438 | 0.4 |
| AQQLTYGSSA | 2439 | 0.4 |
| AQPAEKQYSA | 2440 | 0.4 |
| AQAMPRSRGD | 2441 | 0.4 |
| AQGLSGRALA | 2442 | 0.4 |
| AQARVTAVDA | 2443 | 0.4 |
| AQVGVSTAVA | 2444 | 0.4 |
| AQTGVTSAQA | 2445 | 0.4 |
| AQALVTSSEK | 2446 | 0.4 |
| AQASPHSSMA | 2447 | 0.4 |
| AQALTQDEMW | 2448 | 0.4 |
| AQAFSTQQRL | 2449 | 0.4 |
| AQAGSQVTQA | 2450 | 0.4 |
| AQQSTLALKA | 2451 | 0.4 |
| AQALNGSHAA | 2452 | 0.4 |
| AQATEGHLRS | 2453 | 0.4 |
| AQPMANMLMA | 2454 | 0.4 |
| PSTSAVSQKA | 2455 | 0.4 |
| AQAPPSSTEM | 2456 | 0.4 |
| AQRERVDLAA | 2457 | 0.4 |
| AQASVTLPRT | 2458 | 0.4 |
| AQAYPSSSKA | 2459 | 0.4 |
| AQAHSGSAIP | 2460 | 0.4 |
| AQSPSQSLKA | 2461 | 0.4 |
| AQATPPATSP | 2462 | 0.4 |
| CLGAAVNQCA | 2463 | 0.4 |
| VLGQAVRDKA | 2464 | 0.4 |
| AQAQKANNVG | 2465 | 0.4 |
| AQTLLPVNGA | 2466 | 0.4 |
| AQAHGTIQRG | 2467 | 0.4 |
| TVYTAVGVSA | 2468 | 0.4 |
| LGRGAVLDMA | 2469 | 0.4 |
| AQANVRSDQM | 2470 | 0.4 |
| AQARDSQKGW | 2471 | 0.4 |
| AQTPGSRSAA | 2472 | 0.4 |
| AQALPSNARQ | 2473 | 0.4 |
| AQASATSVVH | 2474 | 0.4 |
| AQINLGTMRA | 2475 | 0.4 |
| AQVYNNTSAA | 2476 | 0.4 |
| AQASANLTRG | 2477 | 0.4 |
| AQLRTDYTRA | 2478 | 0.4 |
| AQAYSTDVKM | 2479 | 0.4 |
| AQTSQLYQPA | 2480 | 0.4 |
| AQALTQEERW | 2481 | 0.4 |
| LPNGAVRDRA | 2482 | 0.4 |
| VTGSAVAGIA | 2483 | 0.4 |
| AQAFSTDVRM | 2484 | 0.4 |
| AQAHGPTSGV | 2485 | 0.4 |
| AQAGVGLPIA | 2486 | 0.4 |
| AQVNSGQARA | 2487 | 0.4 |
| AQAQTGPPMK | 2488 | 0.4 |
| AQARLAPVAC | 2489 | 0.3 |
| LSIGAVASMA | 2490 | 0.3 |
| AQAQDLGVMR | 2491 | 0.3 |
| PTGLAVTSPA | 2492 | 0.3 |
| AQSASTSWSA | 2493 | 0.3 |
| AQNGSNVRNA | 2494 | 0.3 |
| AQASISSSAT | 2495 | 0.3 |
| AQNSHAHLAA | 2496 | 0.3 |
| AQAVGVKQFF | 2497 | 0.3 |
| AQAHLSPTHA | 2498 | 0.3 |
| AQPAYGSSYA | 2499 | 0.3 |
| AQAHQARSGS | 2500 | 0.3 |
| AQAHTSPTQR | 2501 | 0.3 |
| AQAATPSSSR | 2502 | 0.3 |
| AQAHNSYPKV | 2503 | 0.3 |
| AQSSLGSSLA | 2504 | 0.3 |
| AQALSRSNVG | 2505 | 0.3 |
| AQASLSSLSG | 2506 | 0.3 |
| AQHGSSEFTA | 2507 | 0.3 |
| AQSALVAGVA | 2508 | 0.3 |
| AQASSSSLRP | 2509 | 0.3 |
| AQTARDTGFA | 2510 | 0.3 |
| KSVQAVRDPA | 2511 | 0.3 |
| AQAGSHSSVS | 2512 | 0.3 |
| VRAHAVTGLA | 2513 | 0.3 |
| ASHTAVGEFA | 2514 | 0.3 |
| AQIRSEWRDA | 2515 | 0.3 |
| AQQLARVSGA | 2516 | 0.3 |
| AQAAITSTNS | 2517 | 0.3 |
| AQARDAVQLP | 2518 | 0.3 |
| AQAKELVSTS | 2519 | 0.3 |
| AQGIAETLSA | 2520 | 0.3 |
| AQLGSGFSTA | 2521 | 0.3 |
| AQNAKELERA | 2522 | 0.3 |
| AQTHLQNGVA | 2523 | 0.3 |
| SGNLAVGTPA | 2524 | 0.3 |
| AQPSPGTSVA | 2525 | 0.3 |
| AQSSAAAGRA | 2526 | 0.3 |
| AQAGISAAIM | 2527 | 0.3 |
| AQALGYHQTG | 2528 | 0.3 |
| NAGQAVAARA | 2529 | 0.3 |
| AQPFGGSGYA | 2530 | 0.3 |
| AQAGSPSRLC | 2531 | 0.3 |
| AQARTIGTIA | 2532 | 0.3 |
| AQVVSVSSRA | 2533 | 0.3 |
| AQAGQARSMG | 2534 | 0.3 |
| AQATRGVTAG | 2535 | 0.3 |
| AQQSNGYGRA | 2536 | 0.3 |
| AQASLAPLKS | 2537 | 0.3 |
| AQPGANHNGA | 2538 | 0.3 |
| LGRGAVPDTA | 2539 | 0.3 |
| AQHFQTASLA | 2540 | 0.3 |
| AQAPAGHHTR | 2541 | 0.3 |
| AQPSVQNSMA | 2542 | 0.3 |
| AQAKLSGHVS | 2543 | 0.3 |
| AQFGTSSPSA | 2544 | 0.3 |
| AQASHISSVR | 2545 | 0.3 |
| AQALSRNGIG | 2546 | 0.3 |
| AQASAQVQRS | 2547 | 0.3 |
| AQGGPHLQAA | 2548 | 0.3 |
| AQAQSDSAFR | 2549 | 0.3 |
| AQTYSTDVRM | 2550 | 0.3 |
| LARGAVLDTA | 2551 | 0.3 |
| AQASPHTLRS | 2552 | 0.3 |
| AQHSDTQTRA | 2553 | 0.3 |
| AQATPSPSAS | 2554 | 0.3 |
| AQNQVTYSKA | 2555 | 0.3 |
| AQHTSVVYGA | 2556 | 0.3 |
| AQAQVSQMSH | 2557 | 0.3 |
| SFLRAVKNDA | 2558 | 0.3 |
| AQAYSTDVGM | 2559 | 0.3 |
| AKTPALINLA | 2560 | 0.3 |
| VSTAAVSSAA | 2561 | 0.3 |
| AQAPITSTIS | 2562 | 0.3 |
| AQTNLQTRGA | 2563 | 0.3 |
| AQATRLPTPG | 2564 | 0.3 |
| PQHLAVSSAA | 2565 | 0.2 |
| AQASPHPSRP | 2566 | 0.2 |
| AQAQPAGQRG | 2567 | 0.2 |
| AQPQRQGVQA | 2568 | 0.2 |
| AQHVAGSSNA | 2569 | 0.2 |
| AQVPIQMGVA | 2570 | 0.2 |
| AQATVSVPLK | 2571 | 0.2 |
| AQISVSHTRA | 2572 | 0.2 |
| SLVGPVAQMA | 2573 | 0.2 |
| AQPRLNLTEA | 2574 | 0.2 |
| AQASQEYSRL | 2575 | 0.2 |
| AQKSLAFDSA | 2576 | 0.2 |
| AQALGHSHHC | 2577 | 0.2 |
| AQAAQTGRPI | 2578 | 0.2 |
| AQASGTSVRQ | 2579 | 0.2 |
| AQAMGTASYC | 2580 | 0.2 |
| AQISHNHPQA | 2581 | 0.2 |
| AQAYSTYVRM | 2582 | 0.2 |
| AQVGKLDIRA | 2583 | 0.2 |
| AQLKQGGINA | 2584 | 0.2 |
| AQASAHFREP | 2585 | 0.2 |
| AQALDTVLSA | 2586 | 0.2 |
| GAGTAVGNIA | 2587 | 0.2 |
| AQANGSATYA | 2588 | 0.2 |
| AQTQLAQQKA | 2589 | 0.2 |
| AQYVTTVSPA | 2590 | 0.2 |
| SQFSAVTVTA | 2591 | 0.2 |
| AQAASDSFRY | 2592 | 0.2 |
| AQASPASVTR | 2593 | 0.2 |
| AQARDSGMFL | 2594 | 0.2 |
| AQSKTTLTLS | 2595 | 0.2 |
| AQLVQESLSA | 2596 | 0.2 |
| AQAALKSLAG | 2597 | 0.2 |
| AQAVPNQGQK | 2598 | 0.2 |
| AQALSRSSLG | 2599 | 0.2 |
| AQAGSVMSRV | 2600 | 0.2 |
| AQMATVTPMA | 2601 | 0.2 |
| AQARTASGID | 2602 | 0.2 |
| SHSSAVSHPA | 2603 | 0.2 |
| AQADRMRTTA | 2604 | 0.2 |
| AQNAQNRALA | 2605 | 0.2 |
| AQAASNAYSS | 2606 | 0.2 |
| AQATFQQAST | 2607 | 0.2 |
| AQVYTISTPA | 2608 | 0.2 |
| AQTVIAVGVA | 2609 | 0.2 |
| LARGAVPPTA | 2610 | 0.2 |
| AQMLQTSVLA | 2611 | 0.2 |
| AQARQVSPLL | 2612 | 0.2 |
| AQAGQMSNAR | 2613 | 0.2 |
| AQTPALIKLA | 2614 | 0.2 |
| AQAYTTDVRK | 2615 | 0.2 |
| VVKGAVLHVA | 2616 | 0.2 |
| AQDTVSVPLK | 2617 | 0.2 |
| AQKGAPSLQA | 2618 | 0.2 |
| AQASYDVGRA | 2619 | 0.2 |
| AQGPLSGMRA | 2620 | 0.2 |
| AQALGTSVPA | 2621 | 0.2 |
| AQVNKGASTA | 2622 | 0.2 |
| AQLTRTSPVA | 2623 | 0.2 |
| AQADAALRFS | 2624 | 0.2 |
| AQVQLVVSPA | 2625 | 0.2 |
| AQAYSSDVRM | 2626 | 0.2 |
| AQARSGLSLP | 2627 | 0.2 |
| AQNGHKFTAA | 2628 | 0.2 |
| AQGLSSATKA | 2629 | 0.2 |
| AQGTWSTVKA | 2630 | 0.2 |
| AQASGVGGRI | 2631 | 0.2 |
| AQTSYPAQKA | 2632 | 0.2 |
| AQNAVPTHSA | 2633 | 0.2 |
| AQSYPEITRA | 2634 | 0.2 |
| AQTGLSTSSA | 2635 | 0.2 |
| AQYDTHNFAA | 2636 | 0.2 |
| AQAVLSSVIQ | 2637 | 0.2 |
| AQDSAVALMA | 2638 | 0.2 |
| AQATGKGALP | 2639 | 0.2 |
| AQNSRSGHDA | 2640 | 0.2 |
| AQAFQKEPSV | 2641 | 0.2 |
| AQAGSTSGKM | 2642 | 0.2 |
| AQRDQAHSQA | 2643 | 0.2 |
| AQAASALSGR | 2644 | 0.2 |
| AQARHSSLLP | 2645 | 0.2 |
| AQGPGTSYLA | 2646 | 0.2 |
| FLAPAVSSKA | 2647 | 0.2 |
| AQAGPQCSSC | 2648 | 0.2 |
| AQALTQHERW | 2649 | 0.2 |
| AQAIRSSERV | 2650 | 0.2 |
| AQAVHSSSVY | 2651 | 0.2 |
| AQSSRTALAA | 2652 | 0.2 |
| AQITFSHTRA | 2653 | 0.2 |
| AQALTLSGGL | 2654 | 0.2 |
| AQAGKTLSVL | 2655 | 0.2 |
| AQASRSNLDN | 2656 | 0.2 |
| AQGSLSTHTA | 2657 | 0.2 |
| AQQSVAYNVA | 2658 | 0.2 |
| AQHTLRLSSA | 2659 | 0.2 |
| AQAGGTPNKL | 2660 | 0.2 |
| AQAFQSLTLA | 2661 | 0.2 |
| AQAVALSHQE | 2662 | 0.2 |
| AQMLASGIPA | 2663 | 0.2 |
| AQNRALDSYA | 2664 | 0.2 |
| AQASGSTTRN | 2665 | 0.2 |
| AQARGDGYVA | 2666 | 0.2 |
| DARVAVLDFA | 2667 | 0.2 |
| AQAVASQVSR | 2668 | 0.2 |
| AQARGPSPAT | 2669 | 0.2 |
| AQHRALDSYD | 2670 | 0.2 |
| AQLIDSTSRA | 2671 | 0.2 |
| AQAQTLSRGS | 2672 | 0.2 |
| AQFRSAITSA | 2673 | 0.2 |
| AQANMTKQSL | 2674 | 0.2 |
| AQNAGSTSRA | 2675 | 0.2 |
| VLGSAVTGRA | 2676 | 0.2 |
| AQPMLQSSSA | 2677 | 0.2 |
| AQLGTPSLSA | 2678 | 0.2 |
| AQATAHTGVP | 2679 | 0.2 |
| AQAVGRDNRL | 2680 | 0.2 |
| AQATSASVWA | 2681 | 0.2 |
| AQAGSEASLR | 2682 | 0.2 |
| AQANQNRTAF | 2683 | 0.2 |
| AQASAQVKRS | 2684 | 0.2 |
| AQATSGVHHP | 2685 | 0.2 |
| AQTHMQIGVA | 2686 | 0.2 |
| AQSHIFPTPA | 2687 | 0.2 |
| AQLFHTGSPA | 2688 | 0.2 |
| LASRAVVGTA | 2689 | 0.2 |
| AQALLRVGVG | 2690 | 0.2 |
| AQITLPSGTA | 2691 | 0.2 |
| AQAEKSLGRQ | 2692 | 0.2 |
| AQTSNTTTRA | 2693 | 0.2 |
| AQAHTQASYM | 2694 | 0.2 |
| AQERGASSSA | 2695 | 0.2 |
| AQATPSSTAM | 2696 | 0.2 |
| AQSTVNRTYA | 2697 | 0.2 |
| AQAGHGPSTR | 2698 | 0.2 |
| AQLSLVPLQA | 2699 | 0.2 |
| AQLHSPIPSA | 2700 | 0.2 |
| AQSLARDGLA | 2701 | 0.2 |
| AQAPPSSPAM | 2702 | 0.2 |
| TQYGAVERQA | 2703 | 0.1 |
| AQAGQARSLA | 2704 | 0.1 |
| AQPVGRVPPA | 2705 | 0.1 |
| AQAREQRGPV | 2706 | 0.1 |
| AQKTSLLWEA | 2707 | 0.1 |
| AQGSGKNLIA | 2708 | 0.1 |
| AQASEGHQLS | 2709 | 0.1 |
| AQALHAGHHP | 2710 | 0.1 |
| AQSKRDDPSA | 2711 | 0.1 |
| AQTSRELRMA | 2712 | 0.1 |
| AQALPASGAR | 2713 | 0.1 |
| AQSNALLSLA | 2714 | 0.1 |
| AQASPVVGVS | 2715 | 0.1 |
| AQARGDSYMA | 2716 | 0.1 |
| AQAGASSLTV | 2717 | 0.1 |
| AQALRPVNGT | 2718 | 0.1 |
| AQVRSGPTLA | 2719 | 0.1 |
| AQFPPLSRSA | 2720 | 0.1 |
| AQVARGTVQA | 2721 | 0.1 |
| AQTSTQSPPG | 2722 | 0.1 |
| AQARDGMNVR | 2723 | 0.1 |
| AQAVSRNVVV | 2724 | 0.1 |
| AQHTATRSVA | 2725 | 0.1 |
| AQAVREDGHA | 2726 | 0.1 |
| TNSSAVAASA | 2727 | 0.1 |
| AQATFQLAST | 2728 | 0.1 |
| AQAHHQQTSL | 2729 | 0.1 |
| AQGQHAHMMA | 2730 | 0.1 |
| AQATSSLHVL | 2731 | 0.1 |
| AQAPNSGLAM | 2732 | 0.1 |
| SASRAVLDFA | 2733 | 0.1 |
| AQARGEQRFV | 2734 | 0.1 |
| AQTHLQIRVA | 2735 | 0.1 |
| AQAPPSSKAM | 2736 | 0.1 |
| AQIVSKAMPA | 2737 | 0.1 |
| AQASVRNNPS | 2738 | 0.1 |
| AQAESRVAAL | 2739 | 0.1 |
| LTNGAVRDRT | 2740 | 0.1 |
| AQGRLAGSLA | 2741 | 0.1 |
| AQAGQDSARR | 2742 | 0.1 |
| AQAASRLGAV | 2743 | 0.1 |
| AQALARGMAS | 2744 | 0.1 |
| AQASRGLSMG | 2745 | 0.1 |
| AQAQASSYGS | 2746 | 0.1 |
| AKASRLPTPG | 2747 | 0.1 |
| AQSLSRASTA | 2748 | 0.1 |
| AQASTFVQTI | 2749 | 0.1 |
| AQASSKVVAA | 2750 | 0.1 |
| AQAYRNGEAA | 2751 | 0.1 |
| AQAYSTGVRM | 2752 | 0.1 |
| AQAVSSRSMG | 2753 | 0.1 |
| AQARGGLATP | 2754 | 0.1 |
| AQAGHSGVRA | 2755 | 0.1 |
| AQPSYHGGAA | 2756 | 0.1 |
| AQRVNQVSTA | 2757 | 0.1 |
| AQAAFQQAST | 2758 | 0.1 |
| AQAVPGSPRA | 2759 | 0.1 |
| AQLSLSPLAA | 2760 | 0.1 |
| AQANMTVRVS | 2761 | 0.1 |
| AQATRSSGDP | 2762 | 0.1 |
| AQVASNATRA | 2763 | 0.1 |
| AQTNQQPRGA | 2764 | 0.1 |
| AQRLQNDHLA | 2765 | 0.1 |
| AQAPVQLGRP | 2766 | 0.1 |
| AQRQGPDTLA | 2767 | 0.1 |
| AQHTLSNHMA | 2768 | 0.1 |
| AQLSGMVNRA | 2769 | 0.1 |
| AQDRQVSSRA | 2770 | 0.1 |
| AQRQLSTSLA | 2771 | 0.1 |
| AQQRPTVSFA | 2772 | 0.1 |
| AQAKPHSQLD | 2773 | 0.1 |
| AQAGRVNHPP | 2774 | 0.1 |
| AQAINSQSMR | 2775 | 0.1 |
| AQYSTAVMSA | 2776 | 0.1 |
| SQARAVERSA | 2777 | 0.1 |
| AQAYKSSSVG | 2778 | 0.1 |
| AQASTPGLYP | 2779 | 0.1 |
| AQSRTSMLAA | 2780 | 0.1 |
| AQLFSSNMPA | 2781 | 0.1 |
| AQAYCTDVRM | 2782 | 0.1 |
| AQTMSRGFVA | 2783 | 0.1 |
| AQALNGYPAA | 2784 | 0.1 |
| AQAQTGHPLK | 2785 | 0.1 |
| AQASSNSQYR | 2786 | 0.1 |
| AQAAIKSTIS | 2787 | 0.1 |
| AQSTLNLRPA | 2788 | 0.1 |
| AQATLSPGSG | 2789 | 0.1 |
| AQANGSGTGR | 2790 | 0.1 |
| STSLAVAGRA | 2791 | 0.1 |
| AQASNLSAYR | 2792 | 0.1 |
| AQASRQVLVA | 2793 | 0.1 |
| NEVRAVFFEA | 2794 | 0.1 |
| AKAQGSSSVG | 2795 | 0.1 |
| ARGSAVQSQA | 2796 | 0.1 |
| AVRVAVSSSA | 2797 | 0.1 |
| AQAFSTSQFK | 2798 | 0.1 |
| AQGTSSQRTA | 2799 | 0.1 |
| AQATMSQTIA | 2800 | 0.1 |
| AQSANRSTLA | 2801 | 0.1 |
| AQRDLAHSKA | 2802 | 0.1 |
| AQASKVGLYA | 2803 | 0.1 |
| AQAYYTDVRM | 2804 | 0.1 |
| AQAGLRDPRA | 2805 | 0.1 |
| AQAFSQATGA | 2806 | 0.1 |
| AQVAGMSVRA | 2807 | 0.1 |
| AQAGQSSFTI | 2808 | 0.1 |
| AQKEMRSQGA | 2809 | 0.1 |
| AQNYSSGVRA | 2810 | 0.1 |
| AQITVSYTRA | 2811 | 0.1 |
| AQAQQPRSSI | 2812 | 0.1 |
| WTSGAVPGKA | 2813 | 0.1 |
| AQFKPSQVIA | 2814 | 0.1 |
| RQGQAVGSSA | 2815 | 0.1 |
| AQSISPHYAA | 2816 | 0.1 |
| AQARSLNEYK | 2817 | 0.1 |
| AQAASSRLMA | 2818 | 0.1 |
| AQAYSTDGRM | 2819 | 0.1 |
| AQASVPRVMG | 2820 | 0.1 |
| AQGQMPRYPA | 2821 | 0.1 |
| AQASSGMKPC | 2822 | 0.1 |
| AQPLRSSLSA | 2823 | 0.1 |
| AQNSASQSQA | 2824 | 0.1 |
| AQGHLSGLRA | 2825 | 0.1 |
| AQRAQSGVAA | 2826 | 0.1 |
| AQANPRLQDK | 2827 | 0.1 |
| AQAPRTATLG | 2828 | 0.1 |
| AQRTASLSQA | 2829 | 0.1 |
| AQGNPGLLRA | 2830 | 0.1 |
| MSSHAVGNRA | 2831 | 0.1 |
| AQLAPKASPA | 2832 | 0.1 |
| AQTTQGRERA | 2833 | 0.1 |
| AQASGKSTSS | 2834 | 0.1 |
| AQAPHQHSMK | 2835 | 0.1 |

[2143] A subset of the peptide variants from the NHP biopanning showed a very strong and consistent enrichment over AAV9 and PHP.B controls. Further, the peptide of SEQ ID NO: 1725 not only showed a strong enrichment over AAV9 in the brain, but also in the spinal cord, as it led to a 125.6 fold enrichment over AAV9 in the spinal cord. Following the removal of the least reliable variants, a set of 22 variants with enrichment factors ranging from 7-fold to >400-fold over AAV9 was identified. These were cross-referenced to a non-synthetic PCR-amplified library screened in parallel and 12 candidates showed reliable enrichment and high consistency in both assays. Of these, 5 candidates with the highest enrichment scores in both assays and the highest consistency across animals and tissues were retained for individual evaluation. Candidate capsids were labeled TTD-001, TTD-002, TTD-003, TTD-004 and TTD-005 as shown in Table 3 above.

[2144] After 3 rounds of screening of AAV9 peptide insertion library in NHP, many capsids outperformed their parental capsid AAV9 in penetration of the blood brain barrier (BBB). Some of the capsids comprising a peptide showed high enrichment scores and high consistency both across different brain tissue samples from the same animal and across different animals. Consistency in both NNK and NNM codons was also observed. 22 capsid variants exhibited enrichment factors ranging from 7-fold to >400-fold over AAV9 in the brain tissues. A majority of these variants also demonstrated high enrichment factors up to 125-fold over AAV9 in the spinal cord. Of these, 5 candidates with diverse inserted sequences were selected for further evaluation as individual capsids.

### Example 5. Individual Capsid Characterization

[2145] The goal of these experiments was to determine the transduction level and the spatial distribution of each of the 5 capsid candidates selected from the study described in Example 4 relative to AAV9 following intravascular infusion in NHPs (cynomolgus macaque). The 5 selected capsid candidates were TTD-001 (SEQ ID NO: 3623 and 3636, comprising SEQ ID NO: 1725 or 3648), TTD-002 (SEQ ID NO: 3624, 3625, and 3637, comprising SEQ ID NO: 1726 or 3649), TTD-003 (SEQ ID NO: 3626 and 3638, comprising SEQ ID NO: 1729 or 3650), TTD-004 (SEQ ID NO: 3627 and 3639, comprising SEQ ID NO: 1760 or 3651) and TTD-005 (SEQ ID NO: 3628 and 3640, comprising SEQ ID NO: 1769 or 3652) as outlined in Table 3 above.

[2146] AAV particles were generated with each of these 5 capsids encapsulating a transgene encoding a payload fused to an HA tag (payload-HA) and driven by a full-length CMV/chicken beta actin promoter by triple transfection in HEK293T cells and formulated in a pharmaceutically acceptable solution.

[2147] Each test capsid and AAV9 control were tested by intravenously providing two (2) NHP females the AAV particle formulation at a dose of 2e13 VG/kg. The in-life period was 14 days and then a battery of CNS and peripheral tissues were collected for quantification of transgene mRNA, transgene protein and viral DNA (biodistribution). Samples were also collected, fixed and paraffin embedded for immunohistochemical stainings.

[2148] In a first pass screening of RNA quantification by qRT-PCR and RT-ddPCR, total RNA was extracted from 3-mm punches from various areas of the brain (cortex, striatum, hippocampus, cerebellum), spinal cord sections, liver and heart, and analyzed by qRT-PCR using a proprietary Taqman set specific for the synthetic CAG exon-exon junction. Cynomolgus TBP (TATA box-binding protein) was used as a housekeeping gene. Data are shown in FIG. 6A, FIG. 6B, and FIG. 6C of WO2021230987, the contents of which are hereby incorporated by reference in their entirety.

[2149] TRACER capsids showed an increase in RNA expression in all brain regions relative to AAV9 in at least one animal. The highest and most consistent increase in brain transduction was observed with capsids TTD-003 and TTD-004 (8- to 200-fold depending in various anatomical locations). In this initial screening TTD-001 was not assessed due to staggered animal dosing. An approximate 10- to 12-fold increase was consistently observed in whole brain slices (equivalent to an average of multiple regions), which was consistent with the values indicated in a next-generation sequencing (NGS) assay. In order to increase data robustness, droplet digital RT-PCR (ddPCR) was performed in parallel to qRT-PCR and confirmed the trends indicated by the qPCR data as shown in FIG. 7 of WO2021230987, the contents of which are hereby incorporated by reference in their entirety.

[2150] Interestingly, RNA quantification performed in the spinal cord and dorsal root ganglia indicated important differences between the capsid variants. The spinal cord transduction profile was consistent with the brain, with a strong and consistent increase with TTD-003 and TTD-004 capsids, but interestingly the DRG transduction suggested a substantial detargeting of the TTD-004 capsid, whereas the TTD-003 capsid showed a strongly increased RNA expression as shown in FIG. 8 of WO2021230987, the contents of which are hereby incorporated by reference in their entirety.

[2151] Total DNA was extracted from the same brain tissues as RNA, and biodistribution was measured by ddPCR using a Taqman set specific for the CMV promoter sequence. The RNAseP gene was used as a copy number reference. Vector genome (VG) per cell values were determined both by qPCR and ddPCR. Increased biodistribution was observed for the TTD-004 capsid in most brain regions, but surprisingly none of the other candidates showed a significant increase by comparison with AAV9. This apparent contradiction with the RNA quantification data could suggest that some capsids may present improved properties over AAV9 in post-attachment mechanisms rather than strict vector translocation in CNS parenchyma. Interestingly, DNA analysis confirmed the substantial detargeting of TTD-004 capsid from the DRG (FIG. 9A-9D of WO2021230987, the contents of which are hereby incorporated by reference in their entirety).

[2152] To further explore the behavior of capsid variant TTD-004, viral genome (VG) quantification was completed from tissues collected from heart atrium, heart ventricle, quadriceps muscle, liver (left and right) and diaphragm and compared to vector genome presence as delivered by AAV9 in the same tissues. The data are shown in FIGS. 10A and B of WO2021230987, the contents of which are hereby incorporated by reference in their entirety.

[2153] For TTD-003 and TTD-004 initial immunohistochemical analyses demonstrated the presence of payload-HA to a greater extent than seen with AAV9 delivery in cerebellar tissue, including in the dentate nucleus. Immunohistochemistry confirmed the de-targeting of the dorsal root ganglia for capsid variant TTD-004 as compared to TTD-003 and AAV9.

[2154] Data for each of the variants were compiled as an average mRNA (fold over TBP) or DNA (VG per cell) quantification per capsid variant per tissue as shown in Table 8 below and FIG. 1A-1B and FIG. 2A-2B, respectively

TABLE 8
Characterization of exemplary capsid variants

| Measure | Tissue | AAV9 | TTD-001 | TTD-002 | TTD-003 | TTD-004 | TTD-005 |
|---|---|---|---|---|---|---|---|
| mRNA | Frontal | 0.000325065 | 2.7232575 | 0.000768179 | 0.006268831 | 0.007076252 | 0.002204024 |
| | Cortex | | | | | | |
| mRNA | Sensory | 0.001486245 | 3.400055 | 0.00417739 | 0.006788644 | 0.010976612 | 0.004139604 |
| | Cortex | | | | | | |
| mRNA | Motor Cortex | 0.00063318 | 9.00819 | 0.001050247 | 0.009954825 | 0.010522399 | 0.002942249 |
| mRNA | Putamen | 0.000612759 | 3.557205 | 0.001395549 | 0.011832671 | 0.011476176 | 0.001150153 |
| mRNA | Thalamus | 0.002610992 | 2.863635 | 0.013937891 | 0.101411445 | 0.07565653 | 0.01100289 |
| mRNA | Cerebellar | 0.00133497 | 1.3439 | 0.008517779 | 0.006396677 | 0.012964181 | 0.004382119 |
| | Cortex | | | | | | |
| mRNA | Dentate | 0.001364954 | 0.963955 | — | — | — | — |
| | Nucleus | | | | | | |
| mRNA | Caudate | 0.000352281 | 1.3026 | — | 0.003259804 | 0.00634117 | — |
| mRNA | Hippocampus | 0.000311824 | 0.407015 | — | — | — | — |
| mRNA | SC-cervical | 0.012205449 | 11.877762 | 0.022004264 | 0.026994764 | 0.088316491 | 0.005773054 |
| mRNA | SC-Thoracic | 0.048833465 | 2.9974295 | 0.004360318 | 0.035118928 | 0.020543776 | 0.005629959 |
| mRNA | SC-Lumbar | 0.029887407 | 7.969603 | 0.056231995 | 0.016033388 | 0.047713563 | 0.026324154 |
| mRNA | DRG- | 0.74570895 | 9.274951 | 0.007897714 | 2.47872652 | 0.280868887 | 0.008122233 |
| | cervical | | | | | | |
| mRNA | DRG- | 0.5559061 | 5.22606 | 0.006456564 | 8.721845271 | 0.104701895 | — |
| | Thoracic | | | | | | |
| mRNA | DRG- | 1.089758 | 17.308436 | 0.008247771 | 2.271300217 | 0.426704698 | 0.119974244 |
| | Lumbar | | | | | | |
| mRNA | Lung | 0.004807149 | 0.000546842 | — | — | 0.013744781 | — |
| mRNA | Pancreas | — | — | — | — | — | — |
| mRNA | Colon | 0.017962678 | 0.005041385 | — | — | 0.183862903 | — |
| mRNA | Kidney | 0.043825993 | 0.006649157 | — | — | 0.041234576 | — |
| mRNA | Liver | 0.674478605 | 0.253188648 | — | — | 2.578654807 | — |
| mRNA | Adrenal | — | — | — | — | — | — |
| mRNA | Spleen | 0.014066875 | 0.000955981 | — | — | 0.013435626 | — |
| mRNA | Heart | 1.323389668 | 0.132477314 | — | — | 5.587929805 | — |
| mRNA | Quadriceps | 0.116623509 | — | — | — | 4.527799743 | — |
| mRNA | Diaphragm | 0.250001109 | — | — | — | 1.936435215 | — |
| DNA | Frontal | 0.07713 | 2.104843 | 0.10252 | 0.068367 | 0.380429 | 0.1257545 |
| | Cortex | | | | | | |
| DNA | Sensory | 0.093003 | 2.679886 | 0.07443 | 0.034016 | 0.2670975 | 0.132503 |
| | Cortex | | | | | | |
| DNA | Motor Cortex | 0.08796 | 4.3437625 | 0.0913085 | 0.094401 | 0.318999 | 0.1110695 |
| DNA | Putamen | 0.0581365 | 3.07904 | 0.12326 | 0.1497635 | 0.2731175 | 0.0715295 |
| DNA | Thalamus | 0.0524055 | 2.076863 | 0.0664225 | 0.090511 | 0.214999 | 0.086863 |
| DNA | Cerebellar | 0.014238 | 0.186361 | 0.0092915 | 0.009578 | 0.0356345 | 0.0128655 |
| | Cortex | | | | | | |
| DNA | Dentate | 0.025042 | 0.1861975 | 0.210238 | 0.041906 | 0.106107 | 0.055287 |
| | Nucleus | | | | | | |
| DNA | Caudate | 0.079294 | 3.9433175 | — | 0.0529005 | 0.2451035 | — |
| DNA | Hippocampus | 0.095436 | 1.760891 | 0.205433 | 0.368645 | 1.335324 | 0.432829 |
| DNA | SC-cervical | 0.0376 | 1.143863 | 0.061085 | 0.061535 | 0.07573 | 0.05885 |
| DNA | SC-Thoracic | 0.02692 | 0.933734 | 0.025955 | 0.05011 | 0.064915 | 0.0355 |
| DNA | SC-Lumbar | 0.03615 | 0.992728 | 0.019125 | 0.034175 | 0.085165 | 0.051475 |
| DNA | DRG- | 0.0765 | 0.14319 | 0.08196 | 0.13722 | 0.04115 | 0.071625 |
| | cervical | | | | | | |
| DNA | DRG- | 0.165865 | 0.172363 | 0.07202 | 0.133455 | 0.04444 | 0.03139 |
| | Thoracic | | | | | | |
| DNA | DRG- | 0.218725 | 0.385712 | 0.146115 | 0.153205 | 0.032875 | 0.12034 |
| | Lumbar | | | | | | |
| DNA | Lung | 1.085639916 | 3.72 | 0.958576278 | 0.700015423 | 1.22442329 | 0.919823152 |
| DNA | Pancreas | 0.256670617 | 20.535 | 0.320558325 | 0.240633195 | 0.067860607 | 0.004802583 |
| DNA | Colon | 0.053867646 | 3.405 | 1.179065405 | 0.348969617 | 0.116867365 | 0.015288464 |
| DNA | Kidney | 0.896656371 | 26.635 | 4.861362029 | 0.532746958 | 0.386522209 | 7.973793288 |
| DNA | Liver | 207.332334 | 217.64 | 111.910319 | 193.8349405 | 448.5980021 | 213.0317219 |
| DNA | Adrenal | 1.647725996 | 0.69 | 1.561129869 | 1.871878 | 1.269473156 | 0.847293047 |
| DNA | Spleen | 14.93815481 | 20.43565 | 51.70294001 | 22.79095714 | 6.514778227 | 45.91987284 |
| DNA | Heart | 2.012377817 | 14.49 | 0.757528914 | 1.780956673 | 3.814571986 | 0.44694144 |
| DNA | Quadriceps | 0.724278943 | 1.285 | 0.476250457 | 1.366015493 | 5.611203726 | 0.646197937 |
| DNA | Diaphragm | — | 1.06 | — | — | — | — |

[2155] When calculated as fold over AAV9 the data were as shown in Table 9 below and FIGS. 3A and 3B and FIGS. 4A and 4B.

TABLE 9
Characterization of exemplary capsid variants

| Measure | Tissue | AAV9 | TTD-001 | TTD-002 | TTD-003 | TTD-004 | TTD-005 |
|---|---|---|---|---|---|---|---|
| mRNA | Frontal Cortex | 1.0 | 8378 | 2.4 | 19.3 | 21.8 | 6.8 |
| mRNA | Sensory Cortex | 1.0 | 2288 | 2.8 | 4.6 | 7.4 | 2.8 |
| mRNA | Motor Cortex | 1.0 | 14227 | 1.7 | 15.7 | 16.6 | 4.6 |
| mRNA | Putamen | 1.0 | 5805 | 2.3 | 19.3 | 18.7 | 1.9 |
| mRNA | Thalamus | 1.0 | 1097 | 5.3 | 38.8 | 29.0 | 4.2 |
| mRNA | Cerebellar | 1.0 | 1007 | 6.4 | 4.8 | 9.7 | 3.3 |
| | Cortex | | | | | | |
| mRNA | Dentate | 1.0 | 706 | — | — | — | — |
| | Nucleus | | | | | | |
| mRNA | Caudate | 1.0 | 3698 | — | — | — | — |
| mRNA | Hippocampus | 1.0 | 1305 | — | — | — | — |
| mRNA | SC-cervical | 1.0 | 973 | 1.8 | 2.2 | 7.2 | 0.5 |
| mRNA | SC-Thoracic | 1.0 | 61 | 0.1 | 0.7 | 0.4 | 0.1 |
| mRNA | SC-Lumbar | 1.0 | 267 | 1.9 | 0.5 | 1.6 | 0.9 |
| mRNA | DRG-cervical | 1.0 | 12 | 0.0 | 3.3 | 0.4 | 0.0 |
| mRNA | DRG-Thoracic | 1.0 | 9 | 0.0 | 15.7 | 0.2 | — |
| mRNA | DRG-Lumbar | 1.0 | 16 | 0.0 | 2.1 | 0.4 | 0.1 |
| mRNA | Lung | 1.0 | 0.11 | — | — | 2.9 | — |
| mRNA | Pancreas | — | — | — | — | — | — |
| mRNA | Colon | 1.0 | 0.28 | — | — | 10.2 | — |
| mRNA | Kidney | 1.0 | 0.15 | — | — | 0.9 | — |
| mRNA | Liver | 1.0 | 0.38 | — | — | 3.8 | — |
| mRNA | Adrenal | — | — | — | — | — | — |
| mRNA | Spleen | 1.0 | 0.07 | — | — | 1.0 | — |
| mRNA | Heart | 1.0 | 0.10 | — | — | 4.2 | — |
| mRNA | Quadriceps | 1.0 | — | — | — | 38.8 | — |
| mRNA | Diaphragm | 1.0 | — | — | — | 7.7 | — |
| DNA | Frontal Cortex | 1.0 | 27.29 | 1.3 | 0.9 | 4.9 | 1.6 |
| DNA | Sensory Cortex | 1.0 | 28.82 | 0.8 | 0.4 | 2.9 | 1.4 |
| DNA | Motor Cortex | 1.0 | 49.38 | 1.0 | 1.1 | 3.6 | 1.3 |
| DNA | Putamen | 1.0 | 52.96 | 2.1 | 2.6 | 4.7 | 1.2 |
| DNA | Thalamus | 1.0 | 39.63 | 1.3 | 1.7 | 4.1 | 1.7 |
| DNA | Cerebellar | 1.0 | 13.09 | 0.7 | 0.7 | 2.5 | 0.9 |
| | Cortex | | | | | | |
| DNA | Dentate | 1.0 | 7.44 | 8.4 | 1.7 | 4.2 | 2.2 |
| | Nucleus | | | | | | |
| DNA | Caudate | 1.0 | 49.73 | — | 0.7 | 3.1 | — |
| DNA | Hippocampus | 1.0 | 18.45 | 2.2 | 3.9 | 14.0 | 4.5 |
| DNA | SC-cervical | 1.0 | 30.42 | 1.6 | 1.6 | 2.0 | 1.6 |
| DNA | SC-Thoracic | 1.0 | 34.69 | 1.0 | 1.9 | 2.4 | 1.3 |
| DNA | SC-Lumbar | 1.0 | 27.46 | 0.5 | 0.9 | 2.4 | 1.4 |
| DNA | DRG-cervical | 1.0 | 1.87 | 1.1 | 1.8 | 0.5 | 0.9 |
| DNA | DRG-Thoracic | 1.0 | 1.04 | 0.4 | 0.8 | 0.3 | 0.2 |
| DNA | DRG-Lumbar | 1.0 | 1.76 | 0.7 | 0.7 | 0.2 | 0.6 |
| DNA | Lung | 1.0 | 3.43 | 0.9 | 0.6 | 1.1 | 0.8 |
| DNA | Pancreas | 1.0 | 80.01 | 1.2 | 0.9 | 0.3 | 0.0 |
| DNA | Colon | 1.0 | 63.21 | 21.9 | 6.5 | 2.2 | 0.3 |
| DNA | Kidney | 1.0 | 29.70 | 5.4 | 0.6 | 0.4 | 8.9 |
| DNA | Liver | 1.0 | 1.05 | 0.5 | 0.9 | 2.2 | 1.0 |
| DNA | Adrenal | 1.0 | 0.42 | 0.9 | 1.1 | 0.8 | 0.5 |
| DNA | Spleen | 1.0 | 1.37 | 3.5 | 1.5 | 0.4 | 3.1 |
| DNA | Heart | 1.0 | 7.20 | 0.4 | 0.9 | 1.9 | 0.2 |
| DNA | Quadriceps | 1.0 | 1.77 | 0.7 | 1.9 | 7.7 | 0.9 |
| DNA | Diaphragm | — | — | — | — | — | — |

[2156] Capsid variant TTD-001 showed greater than 5,000 fold increase in payload-HA levels delivered to the brain as compared to AAV9 and measured by qRT-PCR and normalized to TBP. In all CNS tissues measured, TTD-001 showed dramatically enhanced delivery of payload-HA as compared to AAV9.

[2157] Graphical representations of the spinal cord and dorsal root ganglia measurements outlined in Tables 8 and 9 are shown in FIGS. 5A-5B, FIGS. 6A-6B, FIGS. 7A-7B, and FIGS. 8A-8B.

[2158] Immunohistochemistry of fixed brain tissues revealed dramatic transduction in both NHP tested by TTD-001 of the dentate nucleus, cerebellar cortex, cerebral cortex, brain stem, hippocampus, thalamus and putamen. AAV9 transduction of the dentate nucleus, cerebellar cortex, cerebral cortex, hippocampus, thalamus and putamen appeared negligible in comparison. TTD-001 therefore demonstrated broad and robust expression and distribution in the brain following intravenous administration in NHPs. In the dorsal root ganglia, both TTD-001 and AAV9 showed similar IHC patterns. Images of these stainings are shown in FIGS. 9A-9E.

[2159] Immunohistochemical support for the DRG de-targeting nature of capsid variant TTD-004 (as noted above) is shown in FIGS. 10A-10B.

[2160] Graphical representations of the biodistribution of viral genomes delivered by variant capsids or AAV9 to peripheral tissues are shown in FIG. 11A-11B.

### Example 6. Individual Capsid Characterization in the Heart

[2161] This Example characterized the transduction level and the spatial distribution the TTD-001 (SEQ ID NO: 3623 and 3636, comprising SEQ ID NO: 1725 or 3648) and TTD-004 (SEQ ID NO: 3627 and 3639, comprising SEQ ID NO: 1760 or 3651) capsid variants in the heart muscle.

[2162] AAV particles were generated with each of a TTD-001 and TTD-004 capsid variant or a wild-type AAV9 capsid polypeptide control, encapsulating a transgene encoding a payload fused to an HA tag (payload-HA) and driven by a full-length CMV/chicken beta actin promoter. The AAV particles comprising the TTD-001 or TTD-004 capsid variant or the wild-type AAV9 capsid control, were administered intravenously to 2 female NHPs at a dose of 2e13 VG/kg. At day 14 post-administration of the AAV particles, the heart tissue was collected, fixed, and paraffin embedded for immunohistochemical staining. An anti-HA antibody (Cell Signal Technology) was used for staining the heart tissue for visualization of the transduction and distribution of the AAV capsid variants investigated. Both left and right heart ventricle samples were collected and analyzed.

[2163] As shown in FIG. 12A-12C, immunohistochemistry of the fixed heart tissue and cardiomyocytes, demonstrated transduction by both TTD-001 and TTD-004, in the left ventricle (FIG. 12B) and right ventricle (FIG. 12C). However, TTD-004 led to the greatest transduction in the left and right ventricle regions of the heart (FIG. 12B-12C), as compared to TTD-001 and the wild-type AAV9 control, as evidenced by increased IHC staining. TTD-001 and the wild-type AAV9 control demonstrated similar levels of transduction in both regions of the heart, as evidenced by similar IHC staining patterns. These data demonstrate that both the TTD-001 and TTD-004 capsid variants can be utilized to transduce and/or deliver a payload, e.g., a payload described herein, to a heart muscle.

### Example 7. Maturation of TTD-001 Capsid in NHPs

[2164] This Example describes maturation of the TTD-001 (SEQ ID NO: 3623 (DNA) and 3636 (amino acid), comprising SEQ ID NO: 1725 or 3648) capsid variant to further enhance its transduction and biodistribution in the central nervous system and evolve the AAV capsid variants further. Two approaches were used to mature the TTD-001 capsid sequence in order to randomize and mutate within and around the peptide insert comprised within loop VIII of the capsid variant. In the first maturation approach, sets of three contiguous amino acids were randomized across the mutagenesis region in the TTD-001 sequence, which spanned from position 587 to position 602, numbered according to SEQ ID NO: 3636. In the second maturation approach, mutagenic primers were used to introduce point mutations at a low frequency, scattered across the mutagenesis region in the TTD-001 sequences ranging from position 587 to position 602, numbered according to SEQ ID NO: 3636. AAV capsid variants arising from each maturation approach for TTD-001 were pooled together, for subsequent testing and characterization in NHPs (Macaca fascicularis and Callithrix jacchus).

[2165] The library of pooled matured AAV capsid variants generated from TTD-001 matured AAV capsid variant were injected into two cynomolgus macaques (Macaca fascicularis), two marmosets (Callithrix jacchus). After a period in life, the brains of the NHPs were isolated and RNA was extracted from three samples per NHP. Following RNA recovery and RT-PCR amplification, a systematic NGS enrichment analysis was performed to calculate the fold enrichment ratio relative to the corresponding TTD-001 control, and the peptides comprised within the variants were identified. The coefficient of variance (CV) was calculated for each peptide across the six samples, and those that had a CV value <1 were identified, as these were the peptides that were reliably detected in 5/6 or 6/6 of the brain samples isolated from the two NHPs. The average number of reads for each peptide across the samples investigated was also quantified. These TTD-001 matured capsid variants and their peptide sequences are provided in Table 10 (cynomolgus macaques (Macaca fascicularis)) and Table 20 (marmosets (Callithrix jacchus)).

[2166] As shown in Table 10, approximately 338 TTD-001 matured capsid variants demonstrated increased expression relative to the non-matured TTD-001 control, and several variants demonstrated greater than a two-fold enrichment relative to the non-matured TTD-001 control, in cynomolgus macaques (Macaca fascicularis). Also, across the peptides comprised within the TTD-001 matured capsid variants with the greatest fold-enrichment relative to the non-matured TTD-001 capsid in the brains of cynomolgus macaques, it was observed that the modifications in the variant sequences appeared in the C-terminal portion, specifically at residues corresponding to positions 593-595 of a reference sequence numbered according to the amino acid sequence of SEQ ID NO: 138. Additionally, 378 of the top peptides in Table 10 had an average read value of 1 or greater per sample, demonstrating that more functional capsid material was recovered, which could be indicative of less aggregation.

[2167] As shown in Table 20, many TTD-001 matured capsid variants demonstrated increased expression relative to both the AAV9 and the non-matured TTD-001 controls in the brains of marmosets. Approximately, 967 TTD-001 matured variants demonstrated increased expression relative to the non-matured TTD-001 control in the brain of marmosets, with 296 variants showing at least a 10-fold enrichment or greater relative to the non-matured TTD-001 control. Approximately, 850 TTD-001 matured variants demonstrated increased expression relative to AAV9 in the brain of marmosets, with 222 variants showing at least a 10-fold enrichment or greater relative to AAV9. With respect to those TTD-001 matured variants that demonstrated an increased expression in marmosets, it was observed that the majority comprised an amino acid other than Q at position 604 (e.g., Q604) numbered according to SEQ ID NO: 5, 8, or 3636 or at position 597 (Q597) numbered according to SEQ ID NO: 138 (e.g., an E, H, K, or P), such that they comprised the triplet “VEN,” “VHN,” “VKN,” or “VPN” at their C-terminus (corresponding to positions 596-598 of SEQ ID: 138 or positions 603-605 of SEQ ID NO: 5, 8, and 3636). Many of these TTD-001 matured variants also demonstrated an increased expression in the brain of cynomolgus macaques relative to AAV9 (Table 20), including the TTD-001 matured capsid variant comprising the sequence PLNGAVHLYAQAQLSPVKN (SEQ ID NO: 566) and the TTD-001 matured capsid variant comprising the sequence PLNGAVHLYAQAQTGWVPN (SEQ ID NO: 314).

[2168] The fold-change in expression relative to AAV9 and TTD-001 was also calculated in the DRG, heart, muscle (quadriceps), and liver for the TTD-001 matured variants in cynomolgus macaques. The fold-change in the DRG is shown in Table 20, with several variants showing decreased or comparable expression in the DRG relative to AAV9. These variants also demonstrated comparable or lower expression relative to AAV9 in the heart, muscle, and liver.

[2169] Taken together, these data demonstrate that following two maturation approaches, matured TTD-001 capsid variants with loop VIII modifications were generated with significantly enhanced CNS tropism in NHPs (cynomolgus macaques (Macaca fascicularis) and marmosets (Callithrix jacchus)), compared to the corresponding non-matured TTD-001 capsid variant, which already exhibited a significant fold enrichment over AAV9 in the NHP brain.

TABLE 10
NGS fold-enrichment of TTD-001 matured AAV capsid variants in the brain of NHPs
(Macaca fascicularis)

| | | | Fold | | | | | Fold | |
|---|---|---|---|---|---|---|---|---|---|
| | SEQ | | enrichment | | | SEQ | | enrichment | |
| Peptide | ID | | over TTD- | Avg. | Peptide | ID | | over TTD- | Avg. |
| Sequence | NO: | CV | 001 | Reads | Sequence | NO: | CV | 001 | Reads |
| QLNGAVHLYA | 139 | 0.206 | 5.617 | 0.09 | QLNGYVHLYA | 1138 | 0.513 | 0.626 | 0.09 |
| QAQLSPVQN | | | | | QAQTGWVQN | | | | |
| PLDGAVHLYA | 140 | 0.829 | 5.133 | 4.02 | QLNGAVHLYA | 639 | 0.845 | 0.626 | 0.09 |
| QPQTGWVQN | | | | | QAQTTGVQN | | | | |
| QLNGAVHLYA | 141 | 0.770 | 4.088 | 0.09 | PLNGAVHLYA | 640 | 0.602 | 0.625 | 39.96 |
| QAQTMSVQN | | | | | QAQTGFVQN | | | | |
| PLDSSVHLYA | 142 | 0.882 | 3.891 | 1.4 | PLNGAVHLYA | 641 | 0.536 | 0.625 | 42.62 |
| QAQTGWVQN | | | | | QAQSALVQN | | | | |
| PLNGAVHLYA | 143 | 0.879 | 3.879 | 5.47 | ALNGAVHLYA | 642 | 0.278 | 0.624 | 0.75 |
| QAQTTKVQN | | | | | QAQTGWDQN | | | | |
| PLDGAVHLYA | 144 | 0.586 | 3.835 | 11.08 | QLNGAVHLYA | 643 | 0.636 | 0.623 | 0.09 |
| QAQTGSVQN | | | | | QAQISGVQN | | | | |
| ALNGAVHLYA | 145 | 0.865 | 3.765 | 0.09 | QLNGAVHLYA | 644 | 0.520 | 0.623 | 0.14 |
| QAQTTSVQN | | | | | QAQRGSVQN | | | | |
| PLNGSVHLYA | 146 | 0.509 | 3.708 | 0.09 | PLNGAVHLYA | 645 | 0.270 | 0.622 | 0.19 |
| QAQTMSVQN | | | | | QAQTGWVKT | | | | |
| QLNGAVHLYA | 147 | 0.310 | 3.638 | 0.14 | PLNGAVHLYA | 646 | 0.554 | 0.619 | 27.62 |
| QAQTSPVQN | | | | | QAQSQLVQN | | | | |
| PLNGAVHLYA | 148 | 0.547 | 3.634 | 5.61 | PLNGSVHLYA | 647 | 0.202 | 0.617 | 0.33 |
| QAQTMKVQN | | | | | QAQTGWGQN | | | | |
| PLNGAVHLYA | 149 | 0.397 | 3.550 | 21.87 | QLNGAVHLYA | 648 | 0.632 | 0.616 | 0.14 |
| QAQVAQVQN | | | | | QAQTGWVPN | | | | |
| PLDGAVHLYA | 150 | 0.771 | 3.509 | 2.29 | PLNGAVHLYA | 649 | 0.305 | 0.615 | 0.33 |
| QAQTGGVQN | | | | | KAQTGWVKN | | | | |
| PLNGAVHLYA | 151 | 0.344 | 3.373 | 0.09 | PLNGAVHLYA | 650 | 0.164 | 0.615 | 0.09 |
| QAQTAWDQN | | | | | HAQTGWGQN | | | | |
| PLNGSVHLYA | 152 | 0.190 | 3.335 | 0.23 | ALNGAVHLYA | 651 | 0.330 | 0.613 | 0.61 |
| QAQTGWDQN | | | | | QAQTGWVQH | | | | |
| PLNGAVHLYA | 153 | 0.235 | 3.287 | 0.14 | PLNGSVHLYA | 652 | 0.585 | 0.612 | 0.14 |
| QAQTGSVQH | | | | | QAQIASVQN | | | | |
| PLNGAVHLYA | 154 | 0.564 | 3.259 | 4.25 | ALNGAVHLYA | 653 | 0.416 | 0.611 | 0.14 |
| QAQVKQVQN | | | | | QAQTAMVQN | | | | |
| PLNGAVHLYA | 155 | 0.763 | 3.239 | 24.54 | TLNGAVHLYA | 654 | 0.316 | 0.610 | 0.09 |
| QAQSAPVQN | | | | | QAQTMAVQN | | | | |
| PLNGAVHLYA | 156 | 0.591 | 3.156 | 6.73 | PHNGAVHLYA | 655 | 0.476 | 0.609 | 0.09 |
| QAQLSKVQN | | | | | QAQVSSVQN | | | | |
| PLNGAVHLYA | 157 | 0.587 | 3.107 | 31.03 | PLNGAVQLYA | 656 | 0.693 | 0.606 | 0.09 |
| QAQLAPVQN | | | | | QAQTAPVQN | | | | |
| PLNGAVHLYA | 158 | 0.416 | 3.061 | 15.33 | PLNGSVHLYA | 657 | 0.282 | 0.605 | 0.09 |
| QAQLAQVQN | | | | | QAQKGSVQN | | | | |
| QLNGAVHLYA | 159 | 0.295 | 3.051 | 0.09 | PLNGAVHLYA | 658 | 0.574 | 0.605 | 39.3 |
| QAQVASVQN | | | | | QAQLSAVQN | | | | |
| PLNGAVHLYA | 160 | 0.877 | 2.998 | 8.97 | PINGAVHLYA | 659 | 0.489 | 0.605 | 0.09 |
| QAQTAKVQN | | | | | QAQVSAVQN | | | | |
| PLNGAVHLYA | 161 | 0.678 | 2.971 | 3.27 | PLNGSVHLYA | 660 | 0.514 | 0.604 | 43.37 |
| QAQSAKVQN | | | | | QAQTGLVQN | | | | |
| PLNGAVHLYA | 162 | 0.095 | 2.962 | 0.09 | PLNGAVHIYA | 661 | 0.223 | 0.604 | 0.14 |
| QAQTGCFQN | | | | | QAQTGWFQN | | | | |
| PLNGAVHLYA | 163 | 0.705 | 2.958 | 5.51 | SLNGAVHLYA | 662 | 0.293 | 0.603 | 0.09 |
| QAQTQKVQN | | | | | QAQIASVQN | | | | |
| PLNGSVHLYA | 164 | 0.529 | 2.873 | 0.09 | PLNGAVHLYA | 663 | 0.220 | 0.601 | 0.14 |
| QAQTTSVQN | | | | | QEQTVSVQN | | | | |
| PLNGGVHLYA | 165 | 0.820 | 2.858 | 4.25 | PLNGAVHLYA | 664 | 0.737 | 0.601 | 0.09 |
| QAQTGRVQN | | | | | QAQTMQVQT | | | | |
| PLNGAVHLYA | 166 | 0.410 | 2.854 | 30.94 | HLNGAVHLYA | 665 | 0.338 | 0.600 | 56.78 |
| QAQTVAVQN | | | | | QAQTGWVQN | | | | |
| ALNGAVHLYA | 167 | 0.542 | 2.851 | 0.09 | PLNGAVHLYA | 666 | 0.400 | 0.600 | 24.02 |
| QAQSSPVQN | | | | | QAQTGQVQN | | | | |
| PLNGAVHLYA | 168 | 0.313 | 2.820 | 63.28 | QLNGAVHLYA | 667 | 0.596 | 0.599 | 0.19 |
| QAQLSPVQN | | | | | QAQTGWVQD | | | | |
| QLNGAVHLYA | 169 | 0.846 | 2.769 | 0.14 | PLNGAVHLYD | 668 | 0.526 | 0.599 | 0.09 |
| QAQTTSVQN | | | | | QAQVAQVQN | | | | |
| PLNGAVHLYA | 170 | 0,334 | 2.719 | 18.37 | PLNGAVHLYA | 669 | 0.515 | 0.598 | 0.19 |
| QAQTTQVQN | | | | | QAQTSPVKN | | | | |
| PLNGAVHLYA | 171 | 0.523 | 2.707 | 25.84 | PLNGAIHLYA | 670 | 0.383 | 0.595 | 0.09 |
| QAQTAQVQN | | | | | QAQTSPVQN | | | | |
| QLNGAVHLYA | 172 | 0.195 | 2.682 | 0.09 | PLNGSVHLYA | 671 | 0.578 | 0.595 | 0.19 |
| QAQTVAVQN | | | | | QAQTAMVQN | | | | |
| PLNGAVHLYA | 173 | 0.682 | 2.652 | 3.27 | PLNGAVHLYA | 672 | 0.370 | 0.594 | 0.09 |
| QAQRIAVQN | | | | | QAQLSQVQT | | | | |
| PLNGAVHLYA | 174 | 0.340 | 2.634 | 17.34 | PLNGAVHLYA | 673 | 0.310 | 0.594 | 0.19 |
| QAQRASVQN | | | | | QAQTGSVLN | | | | |
| PLNGAVHLYA | 175 | 0.400 | 2.620 | 45.19 | PLNGAIHLYA | 674 | 0.428 | 0.593 | 0.09 |
| QAQTTPVQN | | | | | QAQTASVQN | | | | |
| QLNGAVHLYA | 176 | 0.474 | 2.613 | 0.09 | PLNGAVHLYA | 675 | 0.785 | 0.592 | 6.68 |
| QAQLASVQN | | | | | QAQTNGVQN | | | | |
| PLNGAVHLYA | 177 | 0.528 | 2.574 | 39.86 | PLNGSVHLYA | 676 | 0.334 | 0.591 | 0.14 |
| QAQLTPVQN | | | | | QAQTGWVQY | | | | |
| PLNGAVHLYA | 178 | 0.519 | 2.572 | 26.5 | PLNGALHLYA | 677 | 0.463 | 0.590 | 0.09 |
| QAQSTPVQN | | | | | QAQTSPVQN | | | | |
| PLNGAVHLYA | 179 | 0.335 | 2.562 | 72.81 | ALNGAVHLYA | 678 | 0.399 | 0.589 | 1.59 |
| QAQTSPVQN | | | | | QAQTGWVQT | | | | |
| QLNGAVHLYA | 180 | 0.428 | 2.528 | 0.09 | PLNGAVHLYA | 679 | 0.193 | 0.586 | 0.47 |
| QAQVSQVQN | | | | | QAQTGWVKK | | | | |
| PLNGAVHLYA | 181 | 0.625 | 2.523 | 19.96 | QLNGAVHLYA | 680 | 0.630 | 0.584 | 1450 |
| QAQTMQVQN | | | | | QAQTGWVQN | | | | |
| PLNGAVHLYA | 182 | 0.458 | 2.476 | 8.32 | PLNGDVHLYA | 681 | 0.630 | 0.580 | 0.09 |
| QAQTSKVQN | | | | | QAQTVAVQN | | | | |
| SLNGAVHLYA | 183 | 0.282 | 2.417 | 0.09 | PLNGGVHLYA | 682 | 0.501 | 0.580 | 0.47 |
| QAQVSPVQN | | | | | QAQPGWVQN | | | | |
| PLNGAVHLYA | 184 | 0.259 | 2.411 | 34.72 | PLNGAVHLYA | 683 | 0.897 | 0.579 | 7.66 |
| QAQVSQVQN | | | | | QAQAAAVQN | | | | |
| PLNGAVHLYA | 185 | 0.721 | 2.404 | 63.42 | PLNGAVHLYA | 684 | 0.618 | 0.579 | 19.72 |
| QAQVSPVQN | | | | | QAQSAVVQN | | | | |
| PLNGAVHLYA | 186 | 0.586 | 2.389 | 15.56 | TLNGAVHLYA | 685 | 0.646 | 0.578 | 0.09 |
| QAQTVQVQN | | | | | QAQRSSVQN | | | | |
| PLNGAVHLYA | 187 | 0.476 | 2.367 | 13.65 | PLNGAVHLYA | 686 | 0.214 | 0.578 | 0.14 |
| QAQVTAVQN | | | | | QAQPGWVQH | | | | |
| PLNGAVHLYA | 188 | 0.715 | 2.353 | 8.74 | PLDGAVHLYA | 687 | 0.214 | 0.577 | 0.09 |
| QAQRQPVQN | | | | | QAQTLSVQN | | | | |
| PLNGNVHLYA | 189 | 0.732 | 2.346 | 2.38 | PLNGAVHLYA | 688 | 0.310 | 0.575 | 0.19 |
| QAQTGGVQN | | | | | QAQTASDQN | | | | |
| PLDGAVHLYA | 190 | 0.697 | 2.339 | 7.06 | PLNGAVHLYA | 689 | 0.633 | 0.575 | 53.51 |
| QAQTAWVQN | | | | | QAQLSGVQN | | | | |
| PLNGAVHLYA | 191 | 0.785 | 2.331 | 9.91 | TLNGAVHLYA | 690 | 0.463 | 0.572 | 0.14 |
| QAQISGVQN | | | | | QAQTVAVQN | | | | |
| PLNGAVHLYA | 192 | 0.794 | 2.324 | 6.22 | PLNGAVHLYA | 691 | 0.293 | 0.572 | 0.09 |
| QAQVRPVQN | | | | | QEQVASVQN | | | | |
| PLNGAVHLYA | 193 | 0.722 | 2.299 | 20.47 | PVNGAVHLYA | 692 | 0.873 | 0.572 | 0.09 |
| QAQLGPVQN | | | | | QAQTGWAQN | | | | |
| PLNGAVHLYA | 194 | 0.404 | 2.290 | 4.91 | PLNGAVHLYA | 693 | 0.567 | 0.570 | 14.07 |
| QAQTNQVQN | | | | | QAQSSRVQN | | | | |
| PLNGAVHLYA | 195 | 0.291 | 2.240 | 14.39 | PLNGSVHLYA | 694 | 0.551 | 0.569 | 0.19 |
| QAQVQQVQN | | | | | QAQLGSVQN | | | | |
| PLNGAVHLYA | 196 | 0.520 | 2.238 | 9.21 | PLNGAVHLYA | 695 | 0.565 | 0.568 | 1.22 |
| QAQVANVQN | | | | | QAQSPPVQN | | | | |
| PLNGAVHLYA | 197 | 0.664 | 2.200 | 10.75 | PLNGAVHHYA | 696 | 0.605 | 0.567 | 0.14 |
| QAQAAPVQN | | | | | QAQTTSVQN | | | | |
| QLNGAVHLYA | 198 | 0.388 | 2.199 | 0.09 | PLNGAVHLYD | 697 | 0.832 | 0.567 | 0.09 |
| QAQVAQVQN | | | | | QAQSTPVQN | | | | |
| PLNGAVHLYA | 199 | 0.487 | 2.195 | 21.59 | QLNGAVHLYA | 698 | 0.529 | 0.567 | 0.37 |
| QAQRSTVQN | | | | | QAQTGWVRN | | | | |
| PLNGAVHLYA | 200 | 0.334 | 2.190 | 29.72 | PLNGAVHLYA | 699 | 0.597 | 0.563 | 0.09 |
| QAQTMAVQN | | | | | QAQVQPVQT | | | | |
| PLNGAVHLYA | 201 | 0.838 | 2.182 | 7.1 | PLNGAVHLYA | 700 | 0.416 | 0.562 | 0.14 |
| QAQIQPVQN | | | | | QAQTSSVKN | | | | |
| PLNGAVHLYA | 202 | 0.567 | 2.181 | 15.52 | PLNGALHLYA | 701 | 0.301 | 0.560 | 0.09 |
| QAQIASVQN | | | | | QAQTASVQN | | | | |
| PLNGAVHLYA | 203 | 0.172 | 2.176 | 76.22 | PLNGAVHHYA | 702 | 0.731 | 0.558 | 0.09 |
| QAQTVSVQN | | | | | QAQSAPVQN | | | | |
| PLNGAVHLYA | 204 | 0.585 | 2.156 | 12.43 | PLNGSVHLYA | 703 | 0.169 | 0.556 | 0.47 |
| QAQRGSVQN | | | | | QAQTGWVHN | | | | |
| PLNGAVHLYA | 205 | 0.376 | 2.143 | 12.85 | PLNGAVHLYA | 704 | 0.519 | 0.556 | 0.09 |
| QAQNSPVQN | | | | | QAQLSPLQN | | | | |
| PLNGAVHLYA | 206 | 0.363 | 2.131 | 24.3 | PLNGAVHLYA | 705 | 0.841 | 0.554 | 0.09 |
| QAQLQPVQN | | | | | KAQVTPVQN | | | | |
| PLNGAVHLYA | 207 | 0.550 | 2.125 | 11.68 | PLNGAVNLYA | 706 | 0.278 | 0.554 | 0.09 |
| QAQVTGVQN | | | | | QAQTQPVQN | | | | |
| PLNGAVHLYA | 208 | 0.810 | 2.121 | 11.26 | SLNGAVHLYA | 707 | 0.518 | 0.553 | 92.07 |
| QAQVMQVQN | | | | | QAQTGLVQN | | | | |
| PLNGAVHLYA | 209 | 0.697 | 2.104 | 14.86 | PLDGSVHLYA | 708 | 0.366 | 0.552 | 0.09 |
| QAQSMAVQN | | | | | QAQTGGVQN | | | | |
| PLNGAVHLYA | 210 | 0.611 | 2.104 | 4.49 | PLNGAVHLYD | 709 | 0.528 | 0.552 | 0.09 |
| QAQVGKVQN | | | | | QAQTLPVQN | | | | |
| ALNGAVHLYA | 211 | 0.652 | 2.101 | 0.09 | PLNGAVHLYA | 710 | 0.441 | 0.551 | 0.09 |
| QAQSAPVQN | | | | | QAQVSQVQK | | | | |
| PLNGAVHLYA | 212 | 0.498 | 2.101 | 3.97 | PLNGAVHLYA | 711 | 0.425 | 0.551 | 13.97 |
| QAQIQSVQN | | | | | QAQLVGVQN | | | | |
| PLNGAVHLYA | 213 | 0.537 | 2.097 | 17.15 | PLNGAVHLYA | 712 | 0.390 | 0.549 | 0.09 |
| QAQCSPVQN | | | | | QEQTSSVQN | | | | |
| PLNGAVHLYA | 214 | 0.821 | 2.079 | 3.97 | PLNGAVHIYA | 713 | 0.435 | 0.549 | 0.09 |
| QAQLQRVQN | | | | | QAQTVAVQN | | | | |
| PLNGAVHLYA | 215 | 0.330 | 2.063 | 0.09 | PLNGAVNLYA | 714 | 0.831 | 0.548 | 0.14 |
| QAQTAWVQH | | | | | QAQVTPVQN | | | | |
| PLDGAVHLYA | 216 | 0.650 | 2.062 | 0.09 | TLNGAVHLYA | 715 | 0.252 | 0.547 | 0.19 |
| QAQTGWDQN | | | | | QAQTMSVQN | | | | |
| PLNGAVHLYA | 217 | 0.411 | 2.062 | 0.89 | TLNGAVHLYA | 716 | 0.341 | 0.541 | 0.09 |
| QAQTPPVQN | | | | | QAQTLAVQN | | | | |
| PLNGAVHLYA | 218 | 0.635 | 2.054 | 1.68 | PINGAVHLYA | 717 | 0.341 | 0.540 | 0.09 |
| QAQVTKVQN | | | | | QAQVAQVQN | | | | |
| PLNGAVHLYA | 219 | 0.556 | 2.033 | 50.94 | PLNGQVHLYA | 718 | 0.885 | 0.540 | 12.57 |
| QAQSSPVQN | | | | | QAQTGWVQN | | | | |
| PLNGAVHLYA | 220 | 0.793 | 2.015 | 9.07 | QLNGAVHLYA | 719 | 0.892 | 0.540 | 39.63 |
| QAQAGPVQN | | | | | QAQTGGVQN | | | | |
| PLNGAVHLYA | 221 | 0.773 | 2.014 | 5.89 | PLNGAVHLYA | 720 | 0.542 | 0.539 | 0.09 |
| QAQLARVQN | | | | | QAQTLSVKN | | | | |
| PLNGAVHLYA | 222 | 0.789 | 2.013 | 16.36 | PLNGTVHLYA | 721 | 0.331 | 0.538 | 0.37 |
| QAQTTTVQN | | | | | QAQTGWDQN | | | | |
| PLNGAVHLYA | 223 | 0.254 | 2.011 | 0.09 | PLNGAVHLYA | 722 | 0.476 | 0.537 | 0.14 |
| QAQTGGFQN | | | | | QAQTGWFQK | | | | |
| PLNGAVHLYA | 224 | 0.657 | 2.010 | 24.44 | ALNGAVHLYA | 723 | 0.447 | 0.536 | 0.09 |
| QAQTLQVQN | | | | | QAQTSKVQN | | | | |
| PLNGAVHLYA | 225 | 0.359 | 2.005 | 63.42 | ALNGTVHLYA | 724 | 0.712 | 0.535 | 49.16 |
| QAQTMSVQN | | | | | QAQTGWVQN | | | | |
| QLNGAVHLYA | 226 | 0.675 | 2.004 | 0.09 | PLNGAVPLYA | 725 | 0.256 | 0.534 | 0.14 |
| QAQLQPVQN | | | | | QAQTGWVQH | | | | |
| PLNGAVHLYA | 227 | 0.894 | 1.994 | 10.47 | PLNGAVHLYA | 726 | 0.355 | 0.533 | 0.23 |
| QAQVAKVQN | | | | | QAKTGWVQK | | | | |
| PLNGAVHLYA | 228 | 0.217 | 1.989 | 7.24 | PLNGAVHLYA | 727 | 0.492 | 0.531 | 1.12 |
| QAQRAAVQN | | | | | QAQTPAVQN | | | | |
| PLNGAVHLYA | 229 | 0.413 | 1.988 | 38.79 | PLNGAVHLYA | 728 | 0.538 | 0.531 | 0.14 |
| QAQTVGVQN | | | | | QAQTVGVKN | | | | |
| PLNGAVHLYA | 230 | 0.381 | 1.972 | 15.84 | PLNGAVHLYA | 729 | 0.307 | 0.530 | 0.14 |
| QAQLNPVQN | | | | | QEQTGWFQN | | | | |
| PLNGAVHLYA | 231 | 0.379 | 1.971 | 26.17 | PLNGAVHLYA | 730 | 0.569 | 0.530 | 0.09 |
| QAQLSQVQN | | | | | QAQKGWDQN | | | | |
| PLNGTVHLYA | 232 | 0.421 | 1.967 | 23.37 | PLNGAVHLYD | 731 | 0.605 | 0.529 | 0.09 |
| QAQTGSVQN | | | | | QAQTSAVQN | | | | |
| PLNGAVHLYA | 233 | 0.543 | 1.960 | 12.95 | PLDGAVHLYA | 732 | 0.657 | 0.527 | 0.37 |
| QAQTKPVQN | | | | | QAQTGWVQK | | | | |
| PLNGAVHLYA | 234 | 0.603 | 1.957 | 7.71 | PLNGAVHLYA | 733 | 0.290 | 0.524 | 0.09 |
| QAQTNAVQN | | | | | QAQTAWVLN | | | | |
| ALDGAVHLYA | 235 | 0.660 | 1.955 | 21.4 | PLNGSVHLYA | 734 | 0.172 | 0.524 | 0.28 |
| QAQTGWVQN | | | | | QAQTGWVLN | | | | |
| PLNGAVHLYA | 236 | 0.303 | 1.955 | 22.06 | QLNGAVHLYA | 735 | 0.605 | 0.524 | 1.68 |
| QAQLATVQN | | | | | QAQTGWVQT | | | | |
| PLNGAVHLYA | 237 | 0.794 | 1.947 | 40.85 | PLNGAVHLYA | 736 | 0.699 | 0.524 | 0.98 |
| QAQVTPVQN | | | | | QAQVPPVQN | | | | |
| PLNGAVHLYA | 238 | 0.339 | 1.946 | 22.2 | PVNGAVHLYA | 737 | 0.734 | 0.522 | 0.09 |
| QAQVQAVQN | | | | | QAQVQSVQN | | | | |
| PLNGAVHLYA | 239 | 0.645 | 1.926 | 58.32 | QLNGAVHLYA | 738 | 0.473 | 0.522 | 0.09 |
| QAQTTSVQN | | | | | QAQTKSVQN | | | | |
| PLNGAVHLYA | 240 | 0.702 | 1.923 | 9.21 | PVNGAVHLYA | 739 | 0.825 | 0.522 | 0.23 |
| QAQCTPVQN | | | | | QAQTSSVQN | | | | |
| ALNGAVHLYA | 241 | 0.621 | 1.916 | 9.58 | PLNGAVHLYA | 740 | 0.797 | 0.520 | 11.45 |
| QAQTGRVQN | | | | | QAQATGVQN | | | | |
| PLNGSVHLYA | 242 | 0.173 | 1.908 | 0.09 | TLNGAVHLYA | 741 | 0.553 | 0.518 | 0.09 |
| QAQTGWVQD | | | | | QAQLSQVQN | | | | |
| PLNGAVHLYA | 243 | 0.555 | 1.903 | 30.47 | PLDGAVHLYA | 742 | 0.486 | 0.517 | 0.37 |
| QAQTAGVQN | | | | | QAQTVSVQN | | | | |
| PLNGAVHLYA | 244 | 0.431 | 1.902 | 29.82 | SLNGAVHLYA | 743 | 0.421 | 0.514 | 0.09 |
| QAQTSQVQN | | | | | QAQTKPVQN | | | | |
| PLNGAVHLYA | 245 | 0.443 | 1.895 | 6.4 | PLKGAVHLYA | 744 | 0.705 | 0.514 | 0.09 |
| QAQTMNVQN | | | | | QAQSAPVQN | | | | |
| PLNGAVHLYA | 246 | 0.323 | 1.885 | 34.16 | PLNGAVHLYA | 745 | 0.275 | 0.514 | 0.19 |
| QAQTSTVQN | | | | | QAKTGWVKN | | | | |
| PLNGAVHLYA | 247 | 0.712 | 1.882 | 12.43 | PLNGSVHLYA | 746 | 0.680 | 0.513 | 0.09 |
| QAQVKPVQN | | | | | QAQTLGVQN | | | | |
| PLNGAVHLYA | 248 | 0.627 | 1.878 | 24.91 | PLKGAVHLYA | 747 | 0.626 | 0.512 | 0.09 |
| QAQASPVQN | | | | | QAQLAPVQN | | | | |
| PLNGAVHLYA | 249 | 0.447 | 1.873 | 23.27 | PLNGSVHLYA | 748 | 0.207 | 0.512 | 1.17 |
| QAQVAAVQN | | | | | QAQTGWVQK | | | | |
| PLNGAVHLYA | 250 | 0.692 | 1.869 | 8.74 | PLNGAVHLYA | 749 | 0.295 | 0.511 | 0.28 |
| QAQLKSVQN | | | | | QAQTGGVQI | | | | |
| PLNGAVHLYA | 251 | 0.834 | 1.855 | 8.09 | PLNGAVHLYA | 750 | 0.440 | 0.510 | 0.37 |
| QAQIAAVQN | | | | | QPQTGWVQT | | | | |
| PLNGAVHLYA | 252 | 0.115 | 1.850 | 26.78 | PLNGAVHLYA | 751 | 0.196 | 0.508 | 4.02 |
| QAQTAAVQN | | | | | QAQTGWVLN | | | | |
| PLNGAVHLYA | 253 | 0.742 | 1.850 | 10.05 | PLNGAVHLYD | 752 | 0.611 | 0.507 | 0.14 |
| QAQTKAVQN | | | | | QAQLTPVQN | | | | |
| PLNGAVHLYA | 254 | 0.223 | 1.848 | 0.09 | QLNGAVHLYA | 753 | 0.558 | 0.507 | 0.28 |
| QAQTGSVQS | | | | | QAQTATVQN | | | | |
| PLNGAVHLYA | 255 | 0.518 | 1.845 | 7.66 | PLNGAVHLYA | 754 | 0.359 | 0.505 | 0.19 |
| QAQVSNVQN | | | | | QAQTAWGQN | | | | |
| PLNGAVHLYA | 256 | 0.690 | 1.834 | 38.65 | PLNGAVHLYA | 755 | 0.273 | 0.505 | 6.78 |
| QAQTAPVQN | | | | | QAQTGWVHN | | | | |
| PLNGAVHLYA | 257 | 0.740 | 1.833 | 28.13 | PLKGAVHLYA | 756 | 0.556 | 0.505 | 0.09 |
| QAQLMPVQN | | | | | QAQSSPVQN | | | | |
| PLNGAVHLYA | 258 | 0.798 | 1.824 | 8.88 | PLNGAVHLYA | 757 | 0.374 | 0.505 | 0.09 |
| QAQLHPVQN | | | | | QAQLGSVQT | | | | |
| PLNGAVHLYA | 259 | 0.793 | 1.823 | 5.09 | PLNGAVHLYA | 758 | 0.656 | 0.505 | 7.62 |
| QAQRAQVQN | | | | | QAQSANVQN | | | | |
| PLNGAVHLYA | 260 | 0.871 | 1.823 | 1.92 | PLNGGVHLYA | 759 | 0.866 | 0.503 | 23.27 |
| QAQLTNVQN | | | | | QAQTGSVQN | | | | |
| PLNGAVHLYA | 261 | 0.766 | 1.822 | 13.18 | PLNGAVHLYD | 760 | 0.433 | 0.503 | 0.09 |
| QAQRTTVQN | | | | | QAQRSSVQN | | | | |
| PLNGAVHLYA | 262 | 0.700 | 1.821 | 17.9 | PLNGAVHLYA | 761 | 0.164 | 0.502 | 0.19 |
| QAQTSVVQN | | | | | QAQTGGVQD | | | | |
| SLNGAVHLYA | 263 | 0.867 | 1.819 | 0.14 | PLNGAVHLYA | 762 | 0.271 | 0.502 | 0.09 |
| QAQTMSVQN | | | | | QAQTMAVKN | | | | |
| ALNGAVHLYA | 264 | 0.672 | 1.818 | 0.09 | PLNGAVHLYA | 763 | 0.325 | 0.501 | 0.23 |
| QAQTLAVQN | | | | | QAQTASVKN | | | | |
| PLNGAVHLYA | 265 | 0.736 | 1.816 | 12.2 | PLNGAVHLYA | 764 | 0.531 | 0.501 | 0.14 |
| QAQRMSVQN | | | | | QAQSSPVQK | | | | |
| ALNGAVHLYA | 266 | 0.342 | 1.813 | 0.14 | PLNGAVHLYA | 765 | 0.275 | 0.499 | 21.68 |
| QAQLTPVQN | | | | | QAQTGWVKN | | | | |
| PLNGAVHLYA | 267 | 0.785 | 1.807 | 3.65 | ALNGAVHLYA | 766 | 0.735 | 0.499 | 25.05 |
| QAQVGNVQN | | | | | QAQTGGVQN | | | | |
| PLNGAVHLYA | 268 | 0.615 | 1.805 | 4.91 | PLNGAVHLYA | 767 | 0.676 | 0.498 | 0.09 |
| QAQLMQVQN | | | | | QAQTGTVQT | | | | |
| PLNGSVHLYA | 269 | 0.550 | 1.795 | 0.09 | PLNGAVHLYA | 768 | 0.476 | 0.495 | 7.43 |
| QAQTAQVQN | | | | | QAQTGWVQI | | | | |
| PLNGAVHLYA | 270 | 0.544 | 1.793 | 24.12 | PINGAVHLYA | 769 | 0.382 | 0.494 | 0.09 |
| QAQTATVQN | | | | | QAQTSLVQN | | | | |
| PLNGAVHLYA | 271 | 0.727 | 1.790 | 7.8 | PLNGAVHIYA | 770 | 0.502 | 0.492 | 0.09 |
| QAQVHPVQN | | | | | QAQVAQVQN | | | | |
| PLNGAVHLYA | 272 | 0.836 | 1.771 | 0.09 | PLNGAVHLYA | 771 | 0.279 | 0.491 | 0.19 |
| QAQVSPVQT | | | | | QAQTVWVKN | | | | |
| PLNGAVHLYA | 273 | 0.638 | 1.766 | 9.11 | TLNGAVHLYA | 772 | 0.827 | 0.491 | 0.09 |
| QAQISSVQN | | | | | QAQLMPVQN | | | | |
| PLNGAVHLYA | 274 | 0.333 | 1.765 | 62.16 | PLNGAVHIYA | 773 | 0.672 | 0.490 | 0.09 |
| QAQVASVQN | | | | | QAQTAPVQN | | | | |
| PLNGAVHLYA | 275 | 0.347 | 1.757 | 0.09 | PLYGAVHLYA | 774 | 0.240 | 0.488 | 0.09 |
| QAQTRWDQN | | | | | QAQTASVQN | | | | |
| PLNGAVHLYA | 276 | 0.508 | 1.750 | 8.88 | TLNGAVHLYA | 775 | 0.643 | 0.488 | 0.09 |
| QAQTMTVQN | | | | | QAQLGPVQN | | | | |
| PLNGAVHLYA | 277 | 0.551 | 1.747 | 34.21 | PLDGAVHLYA | 776 | 0.637 | 0.487 | 0.42 |
| QAQRSSVQN | | | | | QAQTGWVKN | | | | |
| PLNGGVHLYA | 278 | 0.547 | 1.743 | 0.09 | PLKGAVHLYA | 777 | 0.669 | 0.487 | 0.14 |
| QAQTGWVRN | | | | | QAQVSPVQN | | | | |
| PLNGAVHLYA | 279 | 0.281 | 1.741 | 213 | PLNGAVHLYA | 778 | 0.563 | 0.486 | 9.95 |
| QAQTAWVQN | | | | | QAQSQQVQN | | | | |
| PLNGSVHLYA | 280 | 0.130 | 1.734 | 0.28 | PLNGAVDLYA | 779 | 0.497 | 0.484 | 0.09 |
| QAQPGWVQN | | | | | QAQLSPVQN | | | | |
| ALNGAVHLYA | 281 | 0.238 | 1.724 | 0.09 | PLNGAVHLYA | 780 | 0.506 | 0.484 | 0.09 |
| QAQTGWAQN | | | | | QAQVGSVQT | | | | |
| PLNGAVHLYA | 282 | 0.791 | 1.724 | 8.93 | PLNGTVHLYA | 781 | 0.405 | 0.483 | 0.14 |
| QAQRTGVQN | | | | | QAQTGWAQN | | | | |
| ALNGAVHLYA | 283 | 0.370 | 1.720 | 0.09 | ALNGAVHLYA | 782 | 0.283 | 0.482 | 0.09 |
| QAQTGWVQS | | | | | QAQTGLVQT | | | | |
| PLNGAVHLYA | 284 | 0.561 | 1.701 | 22.34 | PLNGAVHLYA | 783 | 0.562 | 0.482 | 35.42 |
| QAQVATVQN | | | | | QAQSSMVQN | | | | |
| PLNGAVHLYA | 285 | 0.480 | 1.700 | 16.68 | PLNGAVHLYA | 784 | 0.484 | 0.481 | 0.09 |
| QAQVTSVQN | | | | | KAQTAGVQN | | | | |
| PLNGAVHLYA | 286 | 0.313 | 1.699 | 74.78 | PLNGAVHLYA | 785 | 0.516 | 0.480 | 0.09 |
| QAQVSSVQN | | | | | HAQTGWVQK | | | | |
| PLNGSVHLYA | 287 | 0.353 | 1.683 | 0.14 | PLNGAVHLYA | 786 | 0.502 | 0.479 | 0.23 |
| QAQTSSVQN | | | | | QAQTSPVQK | | | | |
| PLNGAVHLYA | 288 | 0.348 | 1.682 | 18.83 | PLNGAVHLYA | 787 | 0.841 | 0.477 | 7.66 |
| QAQTNSVQN | | | | | QAQAVGVQN | | | | |
| PLNGAVHLYA | 289 | 0.815 | 1.681 | 6.03 | PLNGAVPLYA | 788 | 0.438 | 0.477 | 0.09 |
| QAQVKAVQN | | | | | QAQTGWGQN | | | | |
| PLNGAVHLYA | 290 | 0.689 | 1.666 | 19.02 | PLNGTVHLYA | 789 | 0.495 | 0.477 | 0.09 |
| QAQSGPVQN | | | | | QAQLGSVQN | | | | |
| PLNGAVHLYA | 291 | 0.660 | 1.663 | 25.61 | QLNGAVHLYA | 790 | 0.645 | 0.476 | 0.75 |
| QAQTGPVQN | | | | | QAQTGWVQH | | | | |
| PLNGAVHLYA | 292 | 0.537 | 1.660 | 22.9 | PLNGSVHLYA | 791 | 0.175 | 0.475 | 1.4 |
| QAQTAMVQN | | | | | QAQTGWVKN | | | | |
| PLNGAVHLYA | 293 | 0.358 | 1.628 | 32.11 | PLNGAVHLYD | 792 | 0.812 | 0.475 | 0.09 |
| QAQTQPVQN | | | | | QAQVAPVQN | | | | |
| PLNGSVHLYA | 294 | 0.533 | 1.625 | 32.76 | PLNGAVNLYA | 793 | 0.460 | 0.473 | 0.19 |
| QAQTGSVQN | | | | | QAQVSSVQN | | | | |
| PLNGAVHLYA | 295 | 0.519 | 1.625 | 14.44 | PLNGAVHLYA | 794 | 0.646 | 0.472 | 0.09 |
| QAQTQQVQN | | | | | QAQTLPVQK | | | | |
| PLNGAVHLYA | 296 | 0.824 | 1.620 | 9.86 | PLNGSVHLYA | 795 | 0.337 | 0.469 | 0.93 |
| QAQVSRVQN | | | | | QAQTASVQN | | | | |
| QLNGAVHLYA | 297 | 0.436 | 1.617 | 0.09 | ALNGAVHLYA | 796 | 0.294 | 0.468 | 0.37 |
| QAQVLPVQN | | | | | QAQTGWGQN | | | | |
| PLNGAVHLYA | 298 | 0.266 | 1.610 | 0.14 | PLNGAVHLYA | 797 | 0.286 | 0.468 | 7.48 |
| QAQTGWVQP | | | | | QAQTGWGQN | | | | |
| QLNGAVHLYA | 299 | 0.776 | 1.609 | 0.09 | PLNGAAHLYA | 798 | 0.451 | 0.467 | 0.09 |
| QAQLGSVQN | | | | | QAQTSPVQN | | | | |
| PLNGAVHLYA | 300 | 0.360 | 1.604 | 40.29 | PLNGAVHLYA | 799 | 0.646 | 0.465 | 0.14 |
| QAQVSAVQN | | | | | QAQTGRVQH | | | | |
| PLNGAVHLYA | 301 | 0.593 | 1.604 | 7.8 | PINGAVHLYA | 800 | 0.768 | 0.464 | 0.09 |
| QAQVLSVQN | | | | | QAQTGWVQS | | | | |
| PLNGAVHLYA | 302 | 0.861 | 1.601 | 5.05 | PLNGAVHLYA | 801 | 0.454 | 0.464 | 2.24 |
| QAQTQHVQN | | | | | QAQTPSVQN | | | | |
| PLNGAVHLYA | 303 | 0.113 | 1.590 | 52.72 | PLNGAVHLYD | 802 | 0.450 | 0.464 | 0.09 |
| QAQLASVQN | | | | | QAQTTAVQN | | | | |
| PLNGAVHLYA | 304 | 0.649 | 1.581 | 8.83 | PLNGNVHLYA | 803 | 0.415 | 0.462 | 0.09 |
| QAQQAPVQN | | | | | QAQTGWVQK | | | | |
| PLNGAVHLYA | 305 | 0.577 | 1.574 | 3.08 | PLNGAVHLYA | 804 | 0.167 | 0.462 | 2.62 |
| QAQNAQVQN | | | | | QAQTGWVEN | | | | |
| PLNGAVHLYA | 306 | 0.760 | 1.567 | 12.81 | PLNGAVNLYA | 805 | 0.371 | 0.461 | 0.19 |
| QAQATPVQN | | | | | QAQTTPVQN | | | | |
| PLNGAVHLYA | 307 | 0.544 | 1.567 | 28.13 | PLNGAVNLYA | 806 | 0.489 | 0.461 | 0.09 |
| QAQVQPVQN | | | | | QAQLSQVQN | | | | |
| PLNGAVHLYA | 308 | 0.537 | 1.563 | 33.13 | SLNGAVHLYA | 807 | 0.263 | 0.460 | 0.14 |
| QAQTTAVQN | | | | | QAQVMSVQN | | | | |
| PLNGAVHLYA | 309 | 0.455 | 1.561 | 3.46 | QLNGAVHLYA | 808 | 0.622 | 0.458 | 0.33 |
| QAQTGWVRN | | | | | QAQTGWVQS | | | | |
| PLNGAVHLYA | 310 | 0.357 | 1.561 | 21.83 | PINGAVHLYA | 809 | 0.534 | 0.457 | 0.19 |
| QAQLAAVQN | | | | | QAQTGWFQN | | | | |
| PLNGAVHLYA | 311 | 0.418 | 1.555 | 0.09 | PLNGDVHLYA | 810 | 0.419 | 0.456 | 0.14 |
| QAQTSPDQN | | | | | QAQVSSVQN | | | | |
| PLNGAVHLYA | 312 | 0.393 | 1.553 | 16.36 | PLNGGVHLYA | 811 | 0.482 | 0.456 | 0.28 |
| QAQRSGVQN | | | | | QAQTGWVQS | | | | |
| PLNGAVHLYA | 313 | 0.218 | 1.551 | 0.65 | PLNGAVNLYA | 812 | 0.559 | 0.456 | 0.09 |
| QAQTGGVQT | | | | | QAQRSTVQN | | | | |
| PLNGAVHLYA | 314 | 0.274 | 1.546 | 0.93 | ALNGAVHLYA | 813 | 0.298 | 0.455 | 0.14 |
| QAQTGWVPN | | | | | QAQTGWVQY | | | | |
| PLDSAVHLYA | 315 | 0.833 | 1.539 | 10.89 | PLNGAVHHYA | 814 | 0.170 | 0.455 | 0.09 |
| QAQTGWVQN | | | | | QAQTAAVQN | | | | |
| PLNGAVHLYA | 316 | 0.496 | 1.537 | 0.09 | PLNGAVHRYA | 815 | 0.346 | 0.454 | 0.09 |
| QAQTTPVQT | | | | | QAQTGWVQH | | | | |
| PLNGAVHLYA | 317 | 0.540 | 1.535 | 7.94 | QLNGAVHLYA | 816 | 0.627 | 0.453 | 0.37 |
| QAQLMAVQN | | | | | QAQTGWVHN | | | | |
| PLNGAVHLYA | 318 | 0.596 | 1.532 | 36.69 | PLNGAVHLYA | 817 | 0.861 | 0.452 | 56.6 |
| QAQTMPVQN | | | | | QAQRGWVQN | | | | |
| PLNGAVHHYA | 319 | 0.391 | 1.529 | 0.09 | PLNGAVHLYA | 818 | 0.233 | 0.450 | 0.14 |
| QAQTSPVQN | | | | | QAQTGSVEN | | | | |
| PLNGAVHLYA | 320 | 0.756 | 1.527 | 7.8 | ALNGAVHLYA | 819 | 0.249 | 0.450 | 0.37 |
| QAQLANVQN | | | | | QAQTGWVHN | | | | |
| PLNGAVHLYA | 321 | 0.606 | 1.520 | 11.68 | PLNGAVNLYA | 820 | 0.494 | 0.449 | 0.09 |
| QAQVSTVQN | | | | | QAQTLAVQN | | | | |
| PLNGAVHLYA | 322 | 0.602 | 1.518 | 12.9 | PLNGAVHLYA | 821 | 0.772 | 0.448 | 91.93 |
| QAQSAQVQN | | | | | QAQSSLVQN | | | | |
| PLNGAVHLYA | 323 | 0.838 | 1.508 | 8.13 | ALNGAVHLYA | 822 | 0.203 | 0.448 | 0.37 |
| QAQNTPVQN | | | | | QAQTGWLQN | | | | |
| PLNGAVHLYA | 324 | 0.381 | 1.495 | 0.09 | TLNGAVHLYA | 823 | 0.736 | 0.448 | 0.09 |
| QAQVSSVQT | | | | | QAQTLQVQN | | | | |
| PLNGAVHLYA | 325 | 0.284 | 1.492 | 0.09 | PLNGAVHLYD | 824 | 0.439 | 0.448 | 0.09 |
| QAQTVSVKN | | | | | QAQVQSVQN | | | | |
| PLNGAVHLYA | 326 | 0.710 | 1.488 | 9.21 | SLNGAVHLYA | 825 | 0.442 | 0.447 | 0.09 |
| QPQTGLVQN | | | | | QAQVTGVQN | | | | |
| PLNGAVHLYA | 327 | 0.287 | 1.487 | 621.2 | QLNGAVHLYA | 826 | 0.849 | 0.444 | 0.09 |
| QAQTGSVQN | | | | | QAQSAVVQN | | | | |
| SLNGAVHLYA | 328 | 0.437 | 1.485 | 0.09 | PLNGVVHLYA | 827 | 0.410 | 0.444 | 0.09 |
| QAQTLPVQN | | | | | QAQTGWVQT | | | | |
| PLNGAVHLYA | 329 | 0.440 | 1.478 | 0.09 | PLNGAVHLYA | 828 | 0.373 | 0.444 | 0.61 |
| QAQTGGAQN | | | | | QAQTAWVKN | | | | |
| SLNGAVHLYA | 330 | 0.618 | 1.477 | 0.09 | TLNGAVHLYA | 829 | 0.557 | 0.443 | 0.14 |
| QAQTAQVQN | | | | | QAQTLPVQN | | | | |
| PLNGAVHLYA | 331 | 0.684 | 1.466 | 14.21 | ALNGAVHLYA | 830 | 0.683 | 0.442 | 0.09 |
| QAQTAVVQN | | | | | QAQTTGVQN | | | | |
| PLNGAVHLYA | 332 | 0.533 | 1.456 | 17.71 | PLNGAVHLYA | 831 | 0.466 | 0.442 | 0.09 |
| QAQRLGVQN | | | | | KAQTMAVQN | | | | |
| PLNGSVHLYA | 333 | 0.207 | 1.453 | 0.37 | PLNGAVHLYA | 832 | 0.636 | 0.442 | 10.61 |
| QAQTGWVQH | | | | | QAQTYSVQN | | | | |
| PLNGAVHLYA | 334 | 0.489 | 1.452 | 21.26 | PLNGCVHLYA | 833 | 0.285 | 0.441 | 0.75 |
| QAQRTLVQN | | | | | QAQTGWVQN | | | | |
| SLNGAVHLYA | 335 | 0.559 | 1.451 | 0.09 | PLNGAVHLYA | 834 | 0.491 | 0.440 | 0.09 |
| QAQTMAVQN | | | | | QAQLAAVQT | | | | |
| PLNGAVHLYA | 336 | 0.707 | 1.447 | 10.23 | PLNGAVHLYA | 835 | 0.734 | 0.440 | 0.14 |
| QAQTQMVQN | | | | | QAQTALVKN | | | | |
| PLNGAVHLYA | 337 | 0.663 | 1.442 | 10.52 | PLNGAVHLYA | 836 | 0.392 | 0.439 | 0.14 |
| QAQITPVQN | | | | | KAQTVAVQN | | | | |
| PLNGAVHLYA | 338 | 0.199 | 1.434 | 0.09 | PLNGAVHLYA | 837 | 0.225 | 0.439 | 0.37 |
| QAQTVWVQK | | | | | HAQTGWVQT | | | | |
| PLNGAVHLYA | 339 | 0.584 | 1.423 | 13.97 | PLNGGVHLYA | 838 | 0.649 | 0.439 | 0.09 |
| QAQRSAVQN | | | | | QAQRGSVQN | | | | |
| PLNGAVHLYA | 340 | 0.332 | 1.420 | 99.87 | PLNGAFHLYA | 839 | 0.462 | 0.436 | 0.14 |
| QAQTASVQN | | | | | QAQTGGVQN | | | | |
| PLNGAVHLYA | 341 | 0.536 | 1.417 | 11.22 | PLNGAVHLYA | 840 | 0.496 | 0.436 | 0.09 |
| QAQTMGVQN | | | | | LAQTSPVQN | | | | |
| PLNGAVHLYA | 342 | 0.256 | 1.414 | 0.28 | PLNGAVHLYA | 841 | 0.225 | 0.435 | 2.9 |
| QAQTGGVQH | | | | | QAQTGWVQY | | | | |
| PLNGAVHLYA | 343 | 0.415 | 1.412 | 36.36 | PLNGAVHLYA | 842 | 0.538 | 0.432 | 0.19 |
| QAQVQSVQN | | | | | QAQTLPVQT | | | | |
| PLNGAVHLYA | 344 | 0.324 | 1.411 | 500.1 | PLNGAVHLYS | 843 | 0.499 | 0.432 | 0.23 |
| QAQTGGVQN | | | | | QAQTGWFQN | | | | |
| SLNGAVHLYA | 345 | 0.471 | 1.411 | 0.09 | PLNGAVHLYA | 844 | 0.696 | 0.432 | 0.33 |
| QAQTAPVQN | | | | | QAQTGLVQH | | | | |
| PLNGAVHLYA | 346 | 0.680 | 1.410 | 16.68 | PLNGAVHLYA | 845 | 0.628 | 0.432 | 0.98 |
| QAQISPVQN | | | | | QAQTPTVQN | | | | |
| PLNGAVHLYA | 347 | 0.345 | 1.409 | 0.09 | PLYGAVHLYA | 846 | 0.274 | 0.429 | 0.28 |
| QPQTGWVKN | | | | | QAQTAWVQN | | | | |
| PLNGAVHLYA | 348 | 0.242 | 1.409 | 0.14 | PLNGAVHLYA | 847 | 0.275 | 0.428 | 0.23 |
| QAQTGSAQN | | | | | KAQTASVQN | | | | |
| PLNGAVHLYA | 349 | 0.474 | 1.393 | 2.62 | PLNGAVHLYA | 848 | 0.285 | 0.428 | 0.19 |
| QAQTGWAQN | | | | | QAQTASVQK | | | | |
| PLNGAVHLYA | 350 | 0.383 | 1.392 | 0.09 | PLDGSVHLYA | 849 | 0.641 | 0.424 | 0.09 |
| QAQTMSVQT | | | | | QAQTAWVQN | | | | |
| PLNGSVHLYA | 351 | 0.649 | 1.391 | 12.29 | PLNGADHLYA | 850 | 0.540 | 0.423 | 0.09 |
| QAQTAWVQN | | | | | QAQTSSVQN | | | | |
| PLNGAVHLYA | 352 | 0.410 | 1.387 | 8.13 | PLNGAVHLYA | 851 | 0.594 | 0.422 | 0.09 |
| QAQVGGVQN | | | | | QAQTSPVQI | | | | |
| PLNGAVHLYA | 353 | 0.496 | 1.387 | 0.09 | PLNGAVHLYA | 852 | 0.661 | 0.420 | 40 |
| KAQTSPVQN | | | | | QAQIGWVQN | | | | |
| PLNGAVHLYA | 354 | 0.768 | 1.381 | 0.09 | PLNGAVHLYA | 853 | 0.209 | 0.419 | 0.09 |
| QAQLAPVQT | | | | | KAQTSTVQN | | | | |
| PLDGAVHLYA | 355 | 0.901 | 1.375 | 0.09 | PLNGAVHRYA | 854 | 0.237 | 0.419 | 0.19 |
| QAQTALVQN | | | | | QAQTGWVQT | | | | |
| PLNGAVHLYA | 356 | 0.594 | 1.368 | 58.98 | PLNGAVHLYD | 855 | 0.268 | 0.419 | 0.14 |
| QAQTALVQN | | | | | QAQTSTVQN | | | | |
| PLNGAVHLYA | 357 | 0.470 | 1.366 | 19.63 | QLNGAVHLYA | 856 | 0.568 | 0.418 | 69.31 |
| QAQLAGVQN | | | | | QAQTGLVQN | | | | |
| PLNGAVHLYA | 358 | 0.613 | 1.365 | 9.53 | PLNGAVNLYA | 857 | 0.864 | 0.417 | 0.09 |
| QAQRTAVQN | | | | | QAQLGPVQN | | | | |
| PLNGAVHLYA | 359 | 0.540 | 1.363 | 22.15 | PLNGAVHLYA | 858 | 0.400 | 0.417 | 0.23 |
| QAQRSPVQN | | | | | QAQTGWDKN | | | | |
| PLNGAVHLYA | 360 | 0.513 | 1.360 | 39.82 | PLNGALHLYA | 859 | 0.432 | 0.416 | 0.14 |
| QAQTLAVQN | | | | | QAQTGWVKN | | | | |
| PLNGAVHLYA | 361 | 0.322 | 1.351 | 5.42 | PLNGNVHLYA | 860 | 0.698 | 0.414 | 0.09 |
| QAQLAHVQN | | | | | HAQTGWVQN | | | | |
| PLNGAVHLYA | 362 | 0.352 | 1.348 | 36.69 | PLNGAVHLYA | 861 | 0.861 | 0.414 | 8.23 |
| QAQTSLVQN | | | | | QAQKSSVQN | | | | |
| PLNGAVHLYA | 363 | 0.548 | 1.347 | 30.75 | PLNGAVHLYA | 862 | 0.691 | 0.412 | 30.7 |
| QAQRLSVQN | | | | | QAQTGYVQN | | | | |
| PLNGAVHLYD | 364 | 0.406 | 1.344 | 0.09 | PVNGAVHLYA | 863 | 0.456 | 0.412 | 0.09 |
| QAQLSPVQN | | | | | QAQVGSVQN | | | | |
| PLNGAVHLYA | 365 | 0.424 | 1.339 | 13.97 | PLNGGVHLYA | 864 | 0.536 | 0.411 | 1.17 |
| QAQLMGVQN | | | | | QAQTGWVKN | | | | |
| PLNGSVHLYA | 366 | 0.147 | 1.336 | 1.03 | PLNGAVHLYA | 865 | 0.627 | 0.410 | 0.09 |
| QAQTGWVQT | | | | | QAQRGWVQT | | | | |
| PLNGAVHLYA | 367 | 0.588 | 1.335 | 11.26 | PLNGAVNLYA | 866 | 0.729 | 0.410 | 0.09 |
| QAQSMQVQN | | | | | QAQRSLVQN | | | | |
| PLNGGVHLYA | 368 | 0.483 | 1.334 | 0.14 | PINGAVHLYA | 867 | 0.358 | 0.410 | 0.51 |
| QAQTGWFQN | | | | | QAQTGWDQN | | | | |
| PLNGAVHLYA | 369 | 0.834 | 1.326 | 14.02 | PLNGNVHLYA | 868 | 0.536 | 0.410 | 0.23 |
| QAQTQTVQN | | | | | QAQTGWVQT | | | | |
| PLDGAVHLYS | 370 | 0.860 | 1.323 | 9.44 | PLNGAVHLYA | 869 | 0.265 | 0.409 | 0.23 |
| QAQTGWVQN | | | | | KAQTGWFQN | | | | |
| PLNGAVHLYA | 371 | 0.325 | 1.319 | 0.14 | PLNGAVHLYA | 870 | 0.421 | 0.408 | 0.09 |
| QAQTGWEQN | | | | | QEQTSTVQN | | | | |
| PLNGAVHLYA | 372 | 0.487 | 1.317 | 29.44 | PLNGAVHLYA | 871 | 0.281 | 0.406 | 0.14 |
| QAQVGSVQN | | | | | QAQTGGVEN | | | | |
| PLNGAVHLYA | 373 | 0.339 | 1.317 | 24.86 | PLNGAVHLYS | 872 | 0.831 | 0.406 | 0.09 |
| QAQVSGVQN | | | | | QAQTGWVQI | | | | |
| PLNGAVHLYA | 374 | 0.767 | 1.312 | 13.04 | SLNGAVHLYA | 873 | 0.480 | 0.406 | 0.09 |
| QAQVMAVQN | | | | | QAQTGLVQK | | | | |
| PLNGAVHLYA | 375 | 0.814 | 1.309 | 23.37 | PLNGAVHLYA | 874 | 0.605 | 0.403 | 0.09 |
| QAQIGGVQN | | | | | QAQTGCVRN | | | | |
| PLNGAVHLYA | 376 | 0.841 | 1.301 | 5.47 | PLNGADHLYA | 875 | 0.758 | 0.402 | 0.09 |
| QAQIAGVQN | | | | | QAQVTPVQN | | | | |
| PLNGAVHLYA | 377 | 0.200 | 1.297 | 0.09 | PLNGAVHLYA | 876 | 0.129 | 0.400 | 0.28 |
| KAQTVSVQN | | | | | PAQTGWVQT | | | | |
| PLNGAVHLYS | 378 | 0.838 | 1.297 | 4.3 | PLNGDVHLYA | 877 | 0.900 | 0.400 | 0.09 |
| QAQTGRVQN | | | | | QAQTSAVQN | | | | |
| PLNGAVHLYA | 379 | 0.826 | 1.296 | 7.34 | TLNGAVHLYA | 878 | 0.635 | 0.399 | 0.09 |
| QAQLSHVQN | | | | | QAQSSLVQN | | | | |
| PLNGAVHLYA | 380 | 0.865 | 1.288 | 4.77 | SLNGAVHLYA | 879 | 0.645 | 0.399 | 0.14 |
| QAQVQTVQN | | | | | QAQRSVVQN | | | | |
| SLDGAVHLYA | 381 | 0.875 | 1.287 | 61.08 | SLNGAVHLYA | 880 | 0.817 | 0.397 | 0.33 |
| QAQTGWVQN | | | | | QAQTGWVQS | | | | |
| PLNGAVHLYA | 382 | 0.326 | 1.287 | 0.09 | PVNGAVHLYA | 881 | 0.800 | 0.397 | 0.14 |
| QPQTGWDQN | | | | | QAQTGWVQS | | | | |
| PLNGAVHLYA | 383 | 0.564 | 1.284 | 11.36 | PLNGAVHLYA | 882 | 0.619 | 0.396 | 0.09 |
| QAQRNSVQN | | | | | QAQLSPVQS | | | | |
| PLNGAVHLYA | 384 | 0.533 | 1.283 | 57.16 | PLNGAVHLYA | 883 | 0.285 | 0.395 | 0.09 |
| QAQTLPVQN | | | | | QPQTGWLQN | | | | |
| PLNGAVHLYA | 385 | 0.569 | 1.282 | 5.09 | PLNGAVNLYA | 884 | 0.719 | 0.394 | 0.14 |
| QAQTKQVQN | | | | | QAQSAPVQN | | | | |
| PLNGSVHLYA | 386 | 0.144 | 1.279 | 972 | PLNGTVHLYA | 885 | 0.384 | 0.394 | 0.09 |
| QAQTGWVQN | | | | | QAQTGWVPN | | | | |
| PLNGAVHLYA | 387 | 0.593 | 1.278 | 11.17 | PVDGAVHLYA | 886 | 0.792 | 0.394 | 0.23 |
| QAQLGQVQN | | | | | QAQTGSVQN | | | | |
| SLNGAVHLYA | 388 | 0.684 | 1.277 | 19.35 | PLNGAVHLYD | 887 | 0.261 | 0.393 | 0.09 |
| QAQTGRVQN | | | | | QAQTAAVQN | | | | |
| PLDGAVHLYA | 389 | 0.647 | 1.275 | 263.1 | PLKGAVHLYA | 888 | 0.352 | 0.392 | 0.09 |
| QAQTGWVQN | | | | | QAQTSTVQN | | | | |
| PLNGSVHLYA | 390 | 0.181 | 1.273 | 0.19 | PLNGAVHLYA | 889 | 0.730 | 0.392 | 0.14 |
| QAQTGWAQN | | | | | QAQTGPVQT | | | | |
| TLNGAVHLYA | 391 | 0.405 | 1.266 | 0.09 | PLNGAVHLYA | 890 | 0.432 | 0.392 | 0.14 |
| QAQVASVQN | | | | | QAQTVGVQK | | | | |
| PLNGAVHLYA | 392 | 0.733 | 1.261 | 2.85 | PLNGAVNLYA | 891 | 0.451 | 0.391 | 0.14 |
| QAQNMQVQN | | | | | QAQTSTVQN | | | | |
| PLNGAVHLYA | 393 | 0.863 | 1.258 | 3.18 | PLNGAVHLYA | 892 | 0.414 | 0.390 | 0.09 |
| QAQNVQVQN | | | | | RAQTVSVQN | | | | |
| PLNGAVHLYA | 394 | 0.299 | 1.250 | 0.14 | PLNGAVHLYA | 893 | 0.431 | 0.390 | 0.09 |
| QAQTGSVQI | | | | | QAQTASGQN | | | | |
| PLNGTVHLYA | 395 | 0.840 | 1.249 | 15.75 | PLNGAVHLYA | 894 | 0.631 | 0.390 | 20.28 |
| QAQTGGVQN | | | | | QAQSVSVQN | | | | |
| PLNGAVHLYA | 396 | 0.805 | 1.248 | 0.09 | PLNGAVHLYA | 895 | 0.724 | 0.389 | 0.09 |
| KAQVSPVQN | | | | | QAQSGPVQT | | | | |
| PLNGAVHLYA | 397 | 0.765 | 1.241 | 6.4 | QLNGAVHLYA | 896 | 0.578 | 0.389 | 0.47 |
| QAQRGGVQN | | | | | QAQTGWGQN | | | | |
| PLNGGVHLYA | 398 | 0.335 | 1.240 | 25.94 | PLNGAVHLYA | 897 | 0.670 | 0.386 | 0.09 |
| QAQTGLVQN | | | | | QAQVMSVKN | | | | |
| PLNGAVHLYA | 399 | 0.542 | 1.237 | 33.32 | PLNGTVHLYA | 898 | 0.557 | 0.386 | 0.09 |
| QAQVMSVQN | | | | | KAQTGSVQN | | | | |
| PLNGAVHLYA | 400 | 0.401 | 1.235 | 15.05 | PLNGAVNLYA | 899 | 0.527 | 0.385 | 0.09 |
| QAQTTGVQN | | | | | QAQTSLVQN | | | | |
| PLNGAVHLYA | 401 | 0.375 | 1.229 | 0.09 | PINGAVHLYA | 900 | 0.867 | 0.385 | 0.14 |
| QAQLSPVQK | | | | | QAQTLSVQN | | | | |
| SLNGAVHLYA | 402 | 0.677 | 1.226 | 0.09 | PLNGAVHLYA | 901 | 0.458 | 0.384 | 0.09 |
| QAQTAAVQN | | | | | QAQLGSVQK | | | | |
| PINGAVHLYA | 403 | 0.351 | 1.223 | 0.14 | TLNGAVHLYA | 902 | 0.728 | 0.383 | 0.09 |
| QAQTSPVQN | | | | | QAQTAMVQN | | | | |
| PLNGAVHLYA | 404 | 0.691 | 1.220 | 15.28 | PLNGAVHLYA | 903 | 0.775 | 0.383 | 0.09 |
| QAQLSRVQN | | | | | QAHLSSVQN | | | | |
| PLNGAVHLYA | 405 | 0.259 | 1.213 | 0.09 | PLNGAVHLYA | 904 | 0.552 | 0.380 | 0.09 |
| QAQVSSVQK | | | | | KAQVMSVQN | | | | |
| PLNGAVHLYA | 406 | 0.768 | 1.212 | 0.09 | PLNGAVHLYA | 905 | 0.569 | 0.380 | 0.09 |
| QAQTAPVQT | | | | | QAQTGLVLN | | | | |
| PLNGAVHLYA | 407 | 0.740 | 1.206 | 7.9 | PLNGGVHLYA | 906 | 0.491 | 0.378 | 1.03 |
| QAQMAPVQN | | | | | QAQTGWVQK | | | | |
| PLNGAVHLYA | 408 | 0.499 | 1.202 | 7.06 | PLNGAVHLYA | 907 | 0.250 | 0.378 | 0.61 |
| QAQILGVQN | | | | | KAQTGWVQK | | | | |
| PLNGAVHLYA | 409 | 0.216 | 1.198 | 0.14 | PLNGAVLLYA | 908 | 0.482 | 0.378 | 0.09 |
| QAQTASVQT | | | | | QAQTASVQN | | | | |
| PLNGAVHLYA | 410 | 0.267 | 1.196 | 0.23 | PLNGDVHLYA | 909 | 0.507 | 0.378 | 0.09 |
| QAQTGSLQN | | | | | QAQTMAVQN | | | | |
| PLNGAVHLYA | 411 | 0.638 | 1.196 | 28.79 | PLNGAVHLYA | 910 | 0.258 | 0.377 | 0.09 |
| QAQTGTVQN | | | | | KAQTAAVQN | | | | |
| PLNGGVHLYA | 412 | 0.578 | 1.193 | 565.1 | PLNGAVHLYA | 911 | 0.549 | 0.377 | 763.5 |
| QAQTGWVQN | | | | | QAQTGLVQN | | | | |
| PLNGAVHLYA | 413 | 0.237 | 1.183 | 0.89 | PLNGDVHLYA | 912 | 0.699 | 0.376 | 0.14 |
| QAQTGSVQT | | | | | QAQSSPVQN | | | | |
| PLNGAVHLYA | 414 | 0.353 | 1.171 | 0.09 | PLNGAVHLYA | 913 | 0.832 | 0.376 | 14.96 |
| QAQTSSVQT | | | | | QAQTSNVQN | | | | |
| PLNGAVHLYA | 415 | 0.414 | 1.167 | 10.84 | ALDGAVHLYA | 914 | 0.702 | 0.376 | 0.47 |
| QAQTSHVQN | | | | | QAQTGSVQN | | | | |
| PLNGGVHLYA | 416 | 0.561 | 1.166 | 0.28 | PLNGAVHLYS | 915 | 0.848 | 0.375 | 0.09 |
| QAQTGWDQN | | | | | QAQTSSVQN | | | | |
| PLNGAVHLYA | 417 | 0.753 | 1.165 | 3.55 | PLKGAVHLYA | 916 | 0.390 | 0.373 | 0.19 |
| QAQRIGVQN | | | | | QAQLSPVQN | | | | |
| TLNGAVHLYA | 418 | 0.771 | 1.164 | 0.09 | LLNGAVHLYA | 917 | 0.349 | 0.373 | 0.09 |
| QAQTTSVQN | | | | | QAQTVSVQN | | | | |
| PLNGAVHLYA | 419 | 0.347 | 1.158 | 0.14 | PLNGGVHLYA | 918 | 0.571 | 0.373 | 0.37 |
| QAQTGWGQT | | | | | QAQTGWVQI | | | | |
| PLNGAVHLYA | 420 | 0.549 | 1.158 | 14.3 | PLNGAVHLYS | 919 | 0.863 | 0.372 | 0.14 |
| QAQSAMVQN | | | | | QAQTGWVRN | | | | |
| PLNGAVHLYA | 421 | 0.510 | 1.156 | 23.23 | PLNGAVHLYA | 920 | 0.426 | 0.371 | 0.09 |
| QAQTSMVQN | | | | | QAQTGWGHN | | | | |
| PLNGAVHLYA | 422 | 0.781 | 1.148 | 13.09 | PHNGAVHLYA | 921 | 0.849 | 0.371 | 0.09 |
| QAQSMGVQN | | | | | QAQTTSVQN | | | | |
| PLNGAVHLYA | 423 | 0.568 | 1.145 | 27.62 | PLNRAVHLYA | 922 | 0.436 | 0.371 | 0.09 |
| QAQSMSVQN | | | | | QAQTGWVQK | | | | |
| PLNGAVHLYA | 424 | 0.442 | 1.145 | 94.03 | PLNGAVHLYD | 923 | 0.509 | 0.371 | 0.09 |
| QAQTSSVQN | | | | | QAQRASVQN | | | | |
| PLNGAVHLYA | 425 | 0.620 | 1.143 | 30.52 | PLNGAVHLYS | 924 | 0.800 | 0.370 | 584.7 |
| QAQTSGVQN | | | | | QAQTGWVQN | | | | |
| PLNGAVHLYA | 426 | 0.557 | 1.141 | 22.9 | PLNGSVHLYA | 925 | 0.401 | 0.370 | 0.42 |
| QAQTGAVQN | | | | | QAQTGTVQN | | | | |
| PLNGAVHLYA | 427 | 0.627 | 1.140 | 14.02 | PLNGAVHLYD | 926 | 0.752 | 0.370 | 0.09 |
| QAQVNSVQN | | | | | QAQTSGVQN | | | | |
| PLNGAVHLYA | 428 | 0.804 | 1.139 | 12.48 | PLNGAVHLYA | 927 | 0.389 | 0.368 | 0.19 |
| QAQVAGVQN | | | | | QAKTGWFQN | | | | |
| PLNGAVHLYA | 429 | 0.710 | 1.139 | 27.01 | KLDGAVHLYA | 928 | 0.763 | 0.367 | 0.14 |
| QAQIGSVQN | | | | | QAQTGLVQN | | | | |
| PLDGAVHVYA | 430 | 0.818 | 1.132 | 9.49 | PLNGAVHLYA | 929 | 0.581 | 0.363 | 9.39 |
| QAQTGWVQN | | | | | QAQSQMVQN | | | | |
| TLNGAVHLYA | 431 | 0.474 | 1.131 | 0.09 | TLNGAVHLYA | 930 | 0.706 | 0.363 | 0.09 |
| QAQTTPVQN | | | | | QAQTSVVQN | | | | |
| PLNGAVHLYA | 432 | 0.442 | 1.131 | 41.64 | PLNGAVHLYA | 931 | 0.449 | 0.361 | 0.09 |
| QAQLGSVQN | | | | | KAQTGTVQN | | | | |
| PLNGAVHLYA | 433 | 0.807 | 1.130 | 7.06 | PLNGAVHLYA | 932 | 0.440 | 0.361 | 0.09 |
| QAQVNGVQN | | | | | QAQTVSVHN | | | | |
| QLNGAVHLYA | 434 | 0.857 | 1.127 | 0.19 | PLNGAVHLYA | 933 | 0.559 | 0.361 | 0.19 |
| QAQLSSVQN | | | | | QAQLSSVQT | | | | |
| PLNGAVHLYA | 435 | 0.652 | 1.127 | 7.62 | PVNGAVHLYA | 934 | 0.791 | 0.359 | 0.28 |
| QAQLTAVQN | | | | | QAQTGWFQN | | | | |
| PLNGAVHLYA | 436 | 0.892 | 1.125 | 3.22 | PLNGAVHLYA | 935 | 0.266 | 0.356 | 0.09 |
| QAQVQNVQN | | | | | QAQTASVRN | | | | |
| PLNGAVHLYA | 437 | 0.737 | 1.117 | 14.63 | PLNGDVHLYA | 936 | 0.410 | 0.355 | 0.09 |
| QAQTKSVQN | | | | | QAQTSTVQN | | | | |
| PLNGAVHLYA | 438 | 0.847 | 1.117 | 16.64 | PLNGAVHLYA | 937 | 0.477 | 0.354 | 0.09 |
| QAQSVGVQN | | | | | KAQLGSVQN | | | | |
| QLNGAVHLYA | 439 | 0.413 | 1.116 | 0.09 | PINGAVHLYA | 938 | 0.774 | 0.354 | 0.09 |
| QAQLGPVQN | | | | | QAQLVPVQN | | | | |
| PLNGAVHLYA | 440 | 0.274 | 1.107 | 0.47 | PLNGAVHHYA | 939 | 0.833 | 0.354 | 0.09 |
| QAQTAWVQT | | | | | QAQLGPVQN | | | | |
| PLNGAVHLYA | 441 | 0.651 | 1.099 | 11.54 | PLNGAVHLYA | 940 | 0.387 | 0.353 | 0.19 |
| QAQNASVQN | | | | | PAQTGWVQH | | | | |
| PLNGAVHLYA | 442 | 0.661 | 1.098 | 45.57 | PLNGAVHLYA | 941 | 0.696 | 0.353 | 0.56 |
| QAQTSAVQN | | | | | QAQVPAVQN | | | | |
| ALNGAVHLYA | 443 | 0.530 | 1.097 | 0.09 | PLNGAVNLYA | 942 | 0.774 | 0.353 | 0.09 |
| QAQLAAVQN | | | | | QAQRLSVQN | | | | |
| PLNGAVHLYD | 444 | 0.721 | 1.097 | 0.09 | PLNGAVHLYA | 943 | 0.534 | 0.352 | 0.23 |
| QAQVSPVQN | | | | | QAQTGRVQK | | | | |
| PLNGAVHLYA | 445 | 0.442 | 1.095 | 0.09 | PLNGAVLLYA | 944 | 0.370 | 0.352 | 0.09 |
| QAQTMSVKN | | | | | QAQTVSVQN | | | | |
| PLNGAVHLYA | 446 | 0.650 | 1.092 | 7.71 | PLNGAVHLYA | 945 | 0.510 | 0.351 | 11.4 |
| QAQTANVQN | | | | | QAQAMSVQN | | | | |
| PLNGAVHLYA | 447 | 0.358 | 1.092 | 5.19 | PLNGAVHLYA | 946 | 0.451 | 0.351 | 0.23 |
| QAQTGWFQN | | | | | QAQTAWVHN | | | | |
| PLNGNVHLYA | 448 | 0.392 | 1.090 | 74.03 | PLNGAVHLYA | 947 | 0.615 | 0.350 | 0.09 |
| QAQTGWVQN | | | | | QPQTGWVRN | | | | |
| PLNGSVHLYA | 449 | 0.195 | 1.087 | 0.23 | PLNGAVHLYA | 948 | 0.548 | 0.350 | 0.09 |
| QAQTGWVQS | | | | | QEQTGWLQN | | | | |
| PLNGAVHLYA | 450 | 0.279 | 1.081 | 0.09 | PLNGAVHLYA | 949 | 0.535 | 0.348 | 0.09 |
| QAQTGGVLN | | | | | KAQTSAVQN | | | | |
| PLNGAVHLYA | 451 | 0.888 | 1.081 | 16.45 | PLNGSVHLYA | 950 | 0.126 | 0.348 | 0.98 |
| QAQLTSVQN | | | | | QAQTVWVQN | | | | |
| PLNGAVHLYA | 452 | 0.176 | 1.079 | 19.3 | PLNGTVHLYA | 951 | 0.330 | 0.347 | 0.33 |
| QAQTGWVQT | | | | | QAQTGWFQN | | | | |
| PLNGAVHLYA | 453 | 0.804 | 1.078 | 10.7 | PLNGAVNLYA | 952 | 0.375 | 0.347 | 0.23 |
| QAQRSQVQN | | | | | QAQVASVQN | | | | |
| PLNGAVHIYA | 454 | 0.840 | 1.074 | 0.09 | PLNGAVHLYA | 953 | 0.674 | 0.347 | 0.19 |
| QAQVSPVQN | | | | | QAQTGLVRN | | | | |
| PLNGSVHLYA | 455 | 0.130 | 1.062 | 0.37 | PLNGAVNLYA | 954 | 0.587 | 0.346 | 0.09 |
| QAQTGWFQN | | | | | QAQLSTVQN | | | | |
| PLNGAVHLYA | 456 | 0.863 | 1.060 | 3.13 | PLNGAVHLYA | 955 | 0.721 | 0.346 | 0.09 |
| QAQRIPVQN | | | | | KAQTQPVQN | | | | |
| QLNGAVHLYA | 457 | 0.718 | 1.054 | 0.09 | PLNGTVHLYA | 956 | 0.382 | 0.346 | 0.33 |
| QAQLVPVQN | | | | | QAQTGWGQN | | | | |
| PLNGAVHLYA | 458 | 0.198 | 1.052 | 2.06 | PLNGAVHLYA | 957 | 0.453 | 0.345 | 0.09 |
| QAQTGWVQD | | | | | QAQRTLVQT | | | | |
| PLNGAVHLYA | 459 | 0.357 | 1.051 | 0.09 | PLNGAVHLYA | 958 | 0.157 | 0.345 | 0.6 |
| KAQVSSVQN | | | | | QAQTGSIQN | | | | |
| PLNGAVHLYA | 460 | 0.721 | 1.051 | 11.54 | QLNGAVHLYA | 959 | 0.574 | 0.344 | 1.4 |
| QAQRVEVQN | | | | | QAQTGWDQN | | | | |
| PLNGAVHLYA | 461 | 0.553 | 1.048 | 56.6 | PLNGAVHLYA | 960 | 0.599 | 0.344 | 0.14 |
| QAQVLPVQN | | | | | QAQLSSVKN | | | | |
| PLNGSVHLYA | 462 | 0.194 | 1.044 | 0.28 | QLNGAVHLYA | 961 | 0.451 | 0.343 | 1.45 |
| QAQTGWVRN | | | | | QAQTVSVQN | | | | |
| PLNGTVHLYA | 463 | 0.648 | 1.040 | 0.09 | PLNGAVHLYA | 962 | 0.726 | 0.343 | 0.09 |
| QAQSSPVQN | | | | | QAQTLQVQK | | | | |
| PLNGAVHLYA | 464 | 0.301 | 1.039 | 0.42 | TLNGAVHLYA | 963 | 0.573 | 0.343 | 0.14 |
| QAQTGGVQK | | | | | QAQVLPVQN | | | | |
| PLNGAVHLYA | 465 | 0.727 | 1.039 | 14.63 | PLNGAVHLYA | 964 | 0.756 | 0.342 | 0.09 |
| QAQSVAVQN | | | | | QAQVGSVKN | | | | |
| QLNGAVHLYA | 466 | 0.815 | 1.030 | 0.09 | PLNGAVHLYA | 965 | 0.744 | 0.341 | 0.09 |
| QAQLSGVQN | | | | | QAQLAPLQN | | | | |
| PLNGAVHLYA | 467 | 0.384 | 1.026 | 11.26 | QLNGAVHLYA | 966 | 0.716 | 0.341 | 0.09 |
| QAQLQQVQN | | | | | QAQTGSVKN | | | | |
| PLNGAVHLYA | 468 | 0.547 | 1.025 | 32.06 | PLNGAVHHYA | 967 | 0.620 | 0.341 | 0.09 |
| QAQLSTVQN | | | | | QAQRSTVQN | | | | |
| PLNGAVHLYA | 469 | 0.813 | 1.025 | 18.09 | QLNGSVHLYA | 968 | 0.266 | 0.341 | 0.23 |
| QAQSAAVQN | | | | | QAQTGRVQN | | | | |
| SLNGAVHLYA | 470 | 0.774 | 1.014 | 0.14 | TLNGAVHLYA | 969 | 0.818 | 0.340 | 0.09 |
| QAQVSAVQN | | | | | QAQVKPVQN | | | | |
| PLNGAVHLYA | 471 | 0.432 | 1.013 | 20.47 | PLNGTVHLYA | 970 | 0.784 | 0.339 | 24.58 |
| QAQRTSVQN | | | | | QAQTGLVQN | | | | |
| PLNGAVHLYA | 472 | 0.877 | 1.012 | 5.47 | PLNGAVHLYA | 971 | 0.396 | 0.338 | 0.65 |
| QAQTQNVQN | | | | | QAQTPGVQN | | | | |
| PLNGAVHLYA | 473 | 0.877 | 1.007 | 4.81 | PINGAVHLYA | 972 | 0.713 | 0.338 | 0.28 |
| QAQVNAVQN | | | | | QAQTSSVQN | | | | |
| PLNGAVHLYA | 474 | 0.585 | 1.006 | 0.09 | PLNGAVHLYA | 973 | 0.428 | 0.337 | 0.09 |
| QAQTVAVQT | | | | | QAQLSAVQT | | | | |
| PLNGAVHLYA | 475 | 0.487 | 1.005 | 20.75 | PLNGAVHLYS | 974 | 0.446 | 0.337 | 0.47 |
| QAQLMSVQN | | | | | QAQTGWDQN | | | | |
| PLNGAVHLYA | 476 | 0.179 | 1.000 | 15655 | PLNCAVHLYA | 975 | 0.856 | 0.336 | 14.39 |
| QAQTGWVQN | | | | | QAQTGWVQN | | | | |
| PLNGAVHLYA | 477 | 0.354 | 0.999 | 0.09 | PLNGAVNLYA | 976 | 0.624 | 0.336 | 0.14 |
| HAQTGWVQH | | | | | QAQTMPVQN | | | | |
| PLNGAVHLYA | 478 | 0.283 | 0.997 | 7.48 | PLNGAVHLYS | 977 | 0.283 | 0.335 | 0.09 |
| QAQTGWVQH | | | | | QAQTVAVQN | | | | |
| PLNGAVHHYA | 479 | 0.408 | 0.993 | 0.09 | PLNGTVHLYA | 978 | 0.366 | 0.334 | 0.79 |
| QAQTMSVQN | | | | | QAQTGWVKN | | | | |
| PLNGAVHLYA | 480 | 0.228 | 0.978 | 3.08 | PLNGGVHLYA | 979 | 0.465 | 0.333 | 0.37 |
| QAQTGWVQS | | | | | QAQTGWVHN | | | | |
| PLNGAVHLYD | 481 | 0.409 | 0.976 | 0.09 | QLNGAVHLYA | 980 | 0.558 | 0.332 | 1.59 |
| QAQTTPVQN | | | | | QAQTGWVQK | | | | |
| PLNGAVHLYA | 482 | 0.837 | 0.973 | 3.69 | PLNGAVQLYA | 981 | 0.524 | 0.331 | 0.09 |
| QAQTMMVQN | | | | | QAQTLAVQN | | | | |
| PLNGAVHLYA | 483 | 0.293 | 0.971 | 0.14 | PLNGTVHLYA | 982 | 0.695 | 0.331 | 0.09 |
| QAQTGGVQS | | | | | QAQVGSVQN | | | | |
| PLNGAVNLYA | 484 | 0.499 | 0.969 | 0.14 | PLNGGVHLYA | 983 | 0.764 | 0.330 | 17.67 |
| QAQTSPVQN | | | | | QAQTGGVQN | | | | |
| ALNGAVHLYA | 485 | 0.322 | 0.968 | 47.95 | PLKGAVHLYA | 984 | 0.474 | 0.330 | 0.09 |
| QAQTGLVQN | | | | | QAQVSQVQN | | | | |
| ALNGAVHLYA | 486 | 0.247 | 0.964 | 0.09 | PLNGAVHHYA | 985 | 0.526 | 0.330 | 0.09 |
| QAQVATVQN | | | | | QAQTQPVQN | | | | |
| PLNGAVHLYA | 487 | 0.258 | 0.959 | 0.23 | PLNGAVHLYA | 986 | 0.156 | 0.329 | 0.33 |
| QAQTGSFQN | | | | | QAPTGWVQT | | | | |
| PLNGAVHLYA | 488 | 0.422 | 0.958 | 27.01 | PLNGAVNLYA | 987 | 0.343 | 0.329 | 0.33 |
| QAQRSVVQN | | | | | QAQTMSVQN | | | | |
| PLNGAVHLYA | 489 | 0.224 | 0.957 | 0.65 | PLNGAVHLYA | 988 | 0.681 | 0.329 | 29.16 |
| QAQTGSVQK | | | | | QAQTGVVQN | | | | |
| PLNGAVHLYA | 490 | 0.503 | 0.954 | 16.31 | PLNGAVHLYA | 989 | 0.622 | 0.328 | 0.42 |
| QAQTQLVQN | | | | | QAQVPQVQN | | | | |
| PLNGAVHLYA | 491 | 0.252 | 0.954 | 0.19 | PHNGAVHLYA | 990 | 0.295 | 0.327 | 0.14 |
| QAQTGGVHN | | | | | QAQTMSVQN | | | | |
| PLNGAVHLYA | 492 | 0.328 | 0.953 | 11.92 | QLNGAVHLYA | 991 | 0.493 | 0.327 | 0.56 |
| QAQRTPVQN | | | | | QAQTGWLQN | | | | |
| PLNGAVHLYA | 493 | 0.852 | 0.952 | 5.33 | PLNGAVHLYA | 992 | 0.118 | 0.327 | 1.03 |
| QAQRQQVQN | | | | | QAQTGCVQK | | | | |
| PLNGAVHLYA | 494 | 0.321 | 0.952 | 0.19 | SLNGAVHLYA | 993 | 0.712 | 0.327 | 0.28 |
| QAQTGSVRN | | | | | QAQTSLVQN | | | | |
| PLNGAVHLYA | 495 | 0.758 | 0.946 | 11.87 | PLNGAVHLYA | 994 | 0.422 | 0.326 | 0.23 |
| QAQVQGVQN | | | | | QAQTRWVQT | | | | |
| TLNGAVHLYA | 496 | 0.854 | 0.942 | 0.14 | TLNGAVHLYA | 995 | 0.743 | 0.325 | 0.09 |
| QAQVSPVQN | | | | | QAQTVQVQN | | | | |
| PLNGAVHLYA | 497 | 0.205 | 0.942 | 0.23 | ALNGAVHLYA | 996 | 0.762 | 0.324 | 0.09 |
| QAQPGWVQT | | | | | QAQKGGVQN | | | | |
| PLNGAVHLYA | 498 | 0.407 | 0.941 | 17.25 | PLNGAVHLYD | 997 | 0.143 | 0.323 | 0.09 |
| QAQSTQVQN | | | | | QAQVSGVQN | | | | |
| PLNGSVHLYA | 499 | 0.247 | 0.939 | 0.09 | PLNGAVHLYA | 998 | 0.554 | 0.323 | 0.65 |
| QAQTGWVEN | | | | | QAQTGLDQN | | | | |
| PLNGAVHLYA | 500 | 0.267 | 0.934 | 22.29 | PLNGAVPLYA | 999 | 0.387 | 0.323 | 0.42 |
| QAQQSPVQN | | | | | QAQTGWVQT | | | | |
| PLNGAVHLYA | 501 | 0.517 | 0.934 | 8.23 | PLNGAVHLYA | 1000 | 0.414 | 0.323 | 0.09 |
| QAQRYSVQN | | | | | QAQVSSVHN | | | | |
| PLNGAVHLYA | 502 | 0.267 | 0.930 | 9.77 | TLNGAVHLYA | 1001 | 0.264 | 0.322 | 0.09 |
| QAQTGWDQN | | | | | QAQTNSVQN | | | | |
| PLNGAVHLYA | 503 | 0.774 | 0.930 | 4.67 | PLNGAGHLYA | 1002 | 0.479 | 0.321 | 0.09 |
| QAQTQRVQN | | | | | QAQLSPVQN | | | | |
| ALNGAVHLYA | 504 | 0.330 | 0.926 | 0.23 | HLNGAVHLYA | 1003 | 0.532 | 0.321 | 0.19 |
| QAQTGWVRN | | | | | QAQTGRVQN | | | | |
| PLNGAVHLYA | 505 | 0.370 | 0.923 | 171 | PLNGAVHLYD | 1004 | 0.872 | 0.320 | 0.09 |
| QPQTGWVQN | | | | | QAQTAMVQN | | | | |
| ALNGAVHLYA | 506 | 0.516 | 0.920 | 0.09 | PINGAVHLYA | 1005 | 0.646 | 0.320 | 0.33 |
| QAQVSGVQN | | | | | QAQTGWVQH | | | | |
| PLNGAVHLYA | 507 | 0.813 | 0.920 | 17.01 | PLNGAVQLYA | 1006 | 0.479 | 0.319 | 0.09 |
| QAQSAGVQN | | | | | QAQTLQVQN | | | | |
| PLNGAVHLYA | 508 | 0.734 | 0.918 | 0.09 | PLNGAVHLYA | 1007 | 0.323 | 0.318 | 0.28 |
| QAQSAPVQT | | | | | QAQKGWVQT | | | | |
| PLNGAVHLYA | 509 | 0.499 | 0.914 | 13.97 | PLNGAVHHYA | 1008 | 0.592 | 0.318 | 0.09 |
| QAQRQSVQN | | | | | QAQSTSVQN | | | | |
| PLNGAVHLYA | 510 | 0.591 | 0.906 | 20.42 | PLNGYVHLYA | 1009 | 0.187 | 0.317 | 2.99 |
| QAQSQPVQN | | | | | QAQTGWVQN | | | | |
| PLNGAVHLYA | 511 | 0.570 | 0.906 | 0.09 | PLNGAVHIYA | 1010 | 0.599 | 0.316 | 0.09 |
| QAQVASVKN | | | | | QAQVQSVQN | | | | |
| PLNGAVHLYA | 512 | 0.403 | 0.904 | 0.09 | PLIGAVHLYA | 1011 | 0.535 | 0.315 | 0.09 |
| QAQTAWVRN | | | | | QAQLSPVQN | | | | |
| SLNGAVHLYA | 513 | 0.491 | 0.904 | 0.09 | TLNGAVHLYA | 1012 | 0.774 | 0.315 | 0.09 |
| QAQTMQVQN | | | | | QAQLLPVQN | | | | |
| PLNGAVNLYA | 514 | 0.664 | 0.902 | 0.09 | PLNGAVHLYS | 1013 | 0.747 | 0.315 | 0.84 |
| QAQSSPVQN | | | | | QAQTGWVQT | | | | |
| PLNGAVHLYA | 515 | 0.318 | 0.901 | 0.23 | ALNGAVHLYA | 1014 | 0.444 | 0.315 | 0.14 |
| QAQTGGGQN | | | | | QAQTQLVQN | | | | |
| PLNGAVHLYD | 516 | 0.515 | 0.898 | 0.09 | PLNGAVHLYA | 1015 | 0.810 | 0.315 | 34.86 |
| QAQVASVQN | | | | | QAQSLPVQN | | | | |
| PLNGAVHLYA | 517 | 0.709 | 0.897 | 45.94 | PVNGAVHLYA | 1016 | 0.890 | 0.314 | 0.09 |
| QAQSTSVQN | | | | | QAQTGWVPN | | | | |
| PLNGTVHLYA | 518 | 0.403 | 0.894 | 0.23 | PLNGAVHLYA | 1017 | 0.247 | 0.313 | 0.19 |
| QAQTGWVQH | | | | | QAKTVSVQN | | | | |
| QLNGAVHLYA | 519 | 0.718 | 0.892 | 0.42 | PLNGAVHLYA | 1018 | 0.645 | 0.313 | 0.09 |
| QAQTSSVQN | | | | | QAQTTSVHN | | | | |
| PLDGAVHLYA | 520 | 0.613 | 0.892 | 0.09 | PVNGAVHLYA | 1019 | 0.765 | 0.313 | 939 |
| QAQTGWVHN | | | | | QAQTGWVQN | | | | |
| PLNGTVHLYA | 521 | 0.397 | 0.888 | 0.33 | PLNGAVHLYA | 1020 | 0.476 | 0.313 | 0.09 |
| QAQTGWVQK | | | | | QAHTGWVQI | | | | |
| PLNGAVHLYA | 522 | 0.369 | 0.888 | 20.28 | PLNGAVRLYA | 1021 | 0.611 | 0.313 | 0.09 |
| QAQVLGVQN | | | | | QAQTASVQN | | | | |
| PLNGAVHLYA | 523 | 0.640 | 0.887 | 5.7 | PLNGGVHLYA | 1022 | 0.646 | 0.313 | 0.09 |
| QAQNQPVQN | | | | | QAQTGLVQK | | | | |
| PLNGAVHLYA | 524 | 0.605 | 0.885 | 21.08 | PLNGAVNLYA | 1023 | 0.652 | 0.313 | 0.14 |
| QAQLGTVQN | | | | | QAQVMSVQN | | | | |
| PLNGAVHLYA | 525 | 0.637 | 0.882 | 7.57 | PLNGAVNLYA | 1024 | 0.682 | 0.312 | 0.09 |
| QAQRAGVQN | | | | | QAQSMSVQN | | | | |
| PVNGAVHLYA | 526 | 0.837 | 0.882 | 42.25 | PLNGAVHLYA | 1025 | 0.513 | 0.312 | 0.09 |
| QAQTGLVQN | | | | | PAQTGWGQN | | | | |
| PLNGGVHLYA | 527 | 0.529 | 0.881 | 0.33 | QLNGAVHLYA | 1026 | 0.595 | 0.311 | 0.47 |
| QAQTGWVQH | | | | | QAQTGWAQN | | | | |
| PLNGAVHLYA | 528 | 0.677 | 0.879 | 116.4 | PLNGAVHLYA | 1027 | 0.451 | 0.311 | 23.13 |
| QAQTGRVQN | | | | | QAQTVWVQN | | | | |
| PLNGAVHLYA | 529 | 0.266 | 0.876 | 0.56 | QLNGAVHLYA | 1028 | 0.742 | 0.311 | 0.09 |
| QAQTGGVKN | | | | | QAQSVSVQN | | | | |
| PLNGAVHLYA | 530 | 0.251 | 0.874 | 0.14 | PLNGAVHLYA | 1029 | 0.426 | 0.311 | 0.09 |
| QAQTAWLQN | | | | | QAQTAQLQN | | | | |
| PLNGAVHLYA | 531 | 0.269 | 0.870 | 0.14 | PLNGAVHLYA | 1030 | 0.453 | 0.311 | 0.09 |
| QAQTRWVQK | | | | | QAHVASVQN | | | | |
| PLNGAVHLYA | 532 | 0.699 | 0.858 | 0.09 | PLNGAVHLYA | 1031 | 0.440 | 0.310 | 0.09 |
| QAQLAPVKN | | | | | KAQRSTVQN | | | | |
| PLNGAVHHYA | 533 | 0.390 | 0.855 | 0.09 | QLNGAVHLYA | 1032 | 0.509 | 0.310 | 1.92 |
| QAQTSSVQN | | | | | QAQTGWVKN | | | | |
| PLNGAVHLYA | 534 | 0.402 | 0.851 | 0.14 | PLNGAVHLYA | 1033 | 0.281 | 0.310 | 0.28 |
| QAQTGSVQD | | | | | QAQTRWVKN | | | | |
| PLNGAVHLYA | 535 | 0.557 | 0.849 | 27.67 | PLNGAVHLYA | 1034 | 0.381 | 0.310 | 0.19 |
| QAQTGMVQN | | | | | QAQTAWIQN | | | | |
| PLNGAVHLYA | 536 | 0.647 | 0.848 | 15.14 | PLNGAVHLYA | 1035 | 0.393 | 0.310 | 0.09 |
| QAQLSNVQN | | | | | QAQLSQVKN | | | | |
| PLNGAVHLYA | 537 | 0.502 | 0.844 | 14.39 | SLNGAVHLYA | 1036 | 0.816 | 0.310 | 2284 |
| QAQRLPVQN | | | | | QAQTGWVQN | | | | |
| PLNGAVHLYA | 538 | 0.782 | 0.842 | 7.52 | PLNGAVHLYA | 1037 | 0.390 | 0.309 | 0.14 |
| QAQRQGVQN | | | | | QAQTSTVKN | | | | |
| PLNGAVHLYA | 539 | 0.563 | 0.839 | 0.09 | PLNGAVHLYA | 1038 | 0.654 | 0.309 | 16.82 |
| QAQSTPVQT | | | | | QAQALPVQN | | | | |
| QLNGNVHLYA | 540 | 0.844 | 0.838 | 5.56 | PLNGAVHLYD | 1039 | 0.158 | 0.309 | 0.33 |
| QAQTGWVQN | | | | | QAQTGWFQN | | | | |
| PLNGGVHLYA | 541 | 0.559 | 0.835 | 0.84 | PLNGAVHVYA | 1040 | 0.527 | 0.309 | 0.09 |
| QAQTGWVQT | | | | | QAQTGWFQN | | | | |
| PLNGAVHLYA | 542 | 0.470 | 0.833 | 0.09 | PINGAVHLYA | 1041 | 0.386 | 0.308 | 0.09 |
| QAQTTPVKN | | | | | QAQVGSVQN | | | | |
| PLNGAVHLYA | 543 | 0.700 | 0.832 | 18.65 | PLNGSVHLYA | 1042 | 0.418 | 0.308 | 0.14 |
| QAQRLTVQN | | | | | QAQTTGVQN | | | | |
| PLNGAVHLYA | 544 | 0.373 | 0.830 | 7.5 | PLNGAVHLYA | 1043 | 0.874 | 0.307 | 0.09 |
| QAQTLRVQN | | | | | KAQASPVQN | | | | |
| PLNGAVHLYA | 545 | 0.742 | 0.830 | 7.34 | PLNGSVHLYA | 1044 | 0.192 | 0.307 | 0.09 |
| QAQSAFVQN | | | | | QAQKAWVQN | | | | |
| SLNGAVHLYA | 546 | 0.586 | 0.824 | 0.09 | SLNGAVHLYA | 1045 | 0.270 | 0.307 | 0.09 |
| QAQTNSVQN | | | | | QAQVLGVQN | | | | |
| PLNGAVHLYA | 547 | 0.658 | 0.824 | 6.92 | PLNGAVHLYA | 1046 | 0.827 | 0.306 | 0.09 |
| QAQSVQVQN | | | | | QEQLMPVQN | | | | |
| PLDGAVHLYA | 548 | 0.568 | 0.823 | 0.09 | ALNGAVHLYA | 1047 | 0.872 | 0.306 | 18.51 |
| QAQTAAVQN | | | | | QSQTGWVQN | | | | |
| SLNGAVHLYA | 549 | 0.532 | 0.821 | 0.09 | PLNGYVHLYD | 1048 | 0.508 | 0.305 | 0.09 |
| QAQLMPVQN | | | | | QAQTGWVQN | | | | |
| PLDGAVHLYA | 550 | 0.621 | 0.820 | 0.47 | PLNGAVHLYA | 1049 | 0.505 | 0.305 | 0.09 |
| QAQTGWVQT | | | | | QAQTSMVQT | | | | |
| PLNGAVHLYA | 551 | 0.672 | 0.819 | 49.77 | QLNGAVHLYA | 1050 | 0.588 | 0.304 | 0.14 |
| QAQLLPVQN | | | | | QAQISSVQN | | | | |
| PLNGAVHLYA | 552 | 0.738 | 0.815 | 6.64 | PVNGAVHLYA | 1051 | 0.723 | 0.304 | 1.12 |
| QAQRTQVQN | | | | | QAQTGWVQT | | | | |
| PLNGAVHLYA | 553 | 0.254 | 0.813 | 0.79 | PLNGAVHLYA | 1052 | 0.713 | 0.303 | 0.09 |
| QAQTGSDQN | | | | | QEQTATVQN | | | | |
| PLNGAVHLYA | 554 | 0.430 | 0.808 | 0.09 | PLNGAVYLYA | 1053 | 0.352 | 0.302 | 0.09 |
| QAQVASDQN | | | | | QAQTVSVQN | | | | |
| PLNGAVNLYA | 555 | 0.744 | 0.805 | 0.09 | PLNGNVHLYA | 1054 | 0.521 | 0.302 | 0.09 |
| QAQLAPVQN | | | | | QAQTASVQN | | | | |
| PLNGSVHLYA | 556 | 0.160 | 0.804 | 0.37 | PLNGYVHLYA | 1055 | 0.556 | 0.301 | 0.09 |
| QAQTGWLQN | | | | | QAQTGLVQN | | | | |
| PLNGTVHLYA | 557 | 0.253 | 0.801 | 500.6 | PLNGAVHLYD | 1056 | 0.402 | 0.301 | 0.14 |
| QAQTGWVQN | | | | | QAQTLSVQN | | | | |
| PLNGAVHLYA | 558 | 0.857 | 0.801 | 0.14 | PLNGAVHLYA | 1057 | 0.499 | 0.300 | 0.14 |
| QAQVSPVKN | | | | | QAQTSSVQH | | | | |
| PLNGAVHLYA | 559 | 0.480 | 0.801 | 1.22 | SLNGAVHLYA | 1058 | 0.737 | 0.300 | 0.19 |
| QAQLPPVQN | | | | | QAQTGWVPN | | | | |
| PLNGAVHLYA | 560 | 0.521 | 0.794 | 0.14 | PLNGAVHLYA | 1059 | 0.839 | 0.300 | 0.09 |
| QAQSSPVQT | | | | | QAQTAMVKN | | | | |
| PLNGAVHLYA | 561 | 0.585 | 0.790 | 8.88 | TLNGAVHLYA | 1060 | 0.700 | 0.299 | 0.14 |
| QAQAQPVQN | | | | | QAQRLSVQN | | | | |
| PLNGDVHLYA | 562 | 0.434 | 0.789 | 0.09 | ALNGAVHLYA | 1061 | 0.341 | 0.297 | 1.64 |
| QAQTTSVQN | | | | | QAQTGWVQK | | | | |
| PLNGAVHLYA | 563 | 0.392 | 0.788 | 0.75 | PLNGAVHLYA | 1062 | 0.722 | 0.297 | 0.19 |
| QAQTPQVQN | | | | | KAQTALVQN | | | | |
| PLNGAVHLYA | 564 | 0.571 | 0.787 | 29.35 | QLNGAVHLYA | 1063 | 0.743 | 0.297 | 0.23 |
| QAQTSWVQN | | | | | QAQTAKVQN | | | | |
| PLNGAVHLYA | 565 | 0.254 | 0.784 | 0.51 | PLNGADHLYA | 1064 | 0.744 | 0.297 | 0.14 |
| QAQTGGDQN | | | | | QAQTTSVQN | | | | |
| PLNGAVHLYA | 566 | 0.547 | 0.782 | 0.14 | PLNGAVHLYA | 1065 | 0.259 | 0.297 | 0.93 |
| QAQLSPVKN | | | | | QAQTPWVQN | | | | |
| PLNGAVHLYA | 567 | 0.603 | 0.782 | 0.09 | PLNGTVHLYA | 1066 | 0.324 | 0.296 | 0.28 |
| QAQSSPVKN | | | | | QAQTGWIQN | | | | |
| PLNGAVHLYA | 568 | 0.727 | 0.781 | 8.41 | PLNGAVHLYA | 1067 | 0.286 | 0.296 | 0.23 |
| QAQNTTVQN | | | | | QAHTGWVQH | | | | |
| PLDGAVHLYA | 569 | 0.716 | 0.780 | 0.19 | PLNGAVHLYA | 1068 | 0.622 | 0.296 | 0.09 |
| QAQTGWVQH | | | | | RAQTASVQN | | | | |
| PLNGAVHLYA | 570 | 0.823 | 0.773 | 6.31 | TLNGAVHLYA | 1069 | 0.876 | 0.295 | 0.14 |
| QAQTTRVQN | | | | | QAQRSLVQN | | | | |
| PLDGAVHLYA | 571 | 0.722 | 0.767 | 0.09 | PLNGAVHLYA | 1070 | 0.481 | 0.294 | 0.14 |
| QAQTGWLQN | | | | | QAHTGWVQK | | | | |
| PLNGSVHLYA | 572 | 0.681 | 0.757 | 8.32 | PLNGDVHLYA | 1071 | 0.859 | 0.294 | 0.14 |
| QPQTGWVQN | | | | | QAQTAQVQN | | | | |
| PLNGAVHLYS | 573 | 0.794 | 0.755 | 25.1 | TLNGAVHLYA | 1072 | 0.407 | 0.294 | 0.14 |
| QAQTGLVQN | | | | | QAQTQPVQN | | | | |
| PLNGAVHLYA | 574 | 0.654 | 0.755 | 14.16 | PLNGAVHLYA | 1073 | 0.505 | 0.294 | 0.7 |
| QAQTQWVQN | | | | | QAQTPRVQN | | | | |
| PLNGSVHLYA | 575 | 0.187 | 0.754 | 0.33 | PRNGAVHLYA | 1074 | 0.200 | 0.293 | 0.09 |
| QAQTGWVQI | | | | | QAQTMSVQN | | | | |
| PLNGAVHLYA | 576 | 0.259 | 0.753 | 0.28 | PLNGAVHLYA | 1075 | 0.118 | 0.293 | 0.23 |
| QAQTGSVHN | | | | | QAHTVSVQN | | | | |
| ALNGAVHLYA | 577 | 0.367 | 0.751 | 1129 | PVNGAVHLYA | 1076 | 0.823 | 0.293 | 0.14 |
| QAQTGWVQN | | | | | QAQTGLVQT | | | | |
| PLNGTVHLYA | 578 | 0.224 | 0.749 | 0.14 | PLNGAVHLYA | 1077 | 0.899 | 0.292 | 87.25 |
| QAQTGWVRN | | | | | QAQSSSVQN | | | | |
| PLNGAVHLYA | 579 | 0.240 | 0.749 | 0.23 | PLNGAVHLYA | 1078 | 0.497 | 0.292 | 0.84 |
| QAQTGGLQN | | | | | QAQRPPVQN | | | | |
| SLNGAVHLYA | 580 | 0.712 | 0.748 | 0.09 | PLNGAVHLYT | 1079 | 0.779 | 0.291 | 0.09 |
| QAQVSGVQN | | | | | QAQVSPVQN | | | | |
| PLNGAVHLYA | 581 | 0.404 | 0.747 | 0.37 | PLNGAVPLYA | 1080 | 0.661 | 0.291 | 0.09 |
| QAQTAWVQK | | | | | QAQTTPVQN | | | | |
| PLNGAVHLYA | 582 | 0.660 | 0.747 | 0.19 | ALNGAVHLYA | 1081 | 0.293 | 0.290 | 1.59 |
| QAQTGRVQT | | | | | QAQTGWVKN | | | | |
| TLNGAVHLYA | 583 | 0.754 | 0.739 | 0.09 | SLNGAVHLYA | 1082 | 0.871 | 0.290 | 0.56 |
| QAQSAPVQN | | | | | QAQTGWVRN | | | | |
| PLNGAVHLYD | 584 | 0.449 | 0.738 | 0.09 | PLNGAVHLYA | 1083 | 0.316 | 0.288 | 0.09 |
| QAQTVAVQN | | | | | QAQLAGVKN | | | | |
| QLNGAVHLYA | 585 | 0.892 | 0.735 | 48.7 | PLNGAVHLYA | 1084 | 0.427 | 0.288 | 0.09 |
| QAQTGSVQN | | | | | QAQTSPAQN | | | | |
| PLNGAVHLYA | 586 | 0.858 | 0.733 | 5.37 | PLNGAVHLYA | 1085 | 0.539 | 0.288 | 0.19 |
| QAQNTQVQN | | | | | KAQLSSVQN | | | | |
| PLNGAVHLYA | 587 | 0.512 | 0.729 | 5.05 | PLNGAVHLYA | 1086 | 0.526 | 0.285 | 0.14 |
| QAQTGWLQN | | | | | QAQRSPVQT | | | | |
| PINGAVHLYA | 588 | 0.684 | 0.721 | 45.57 | PLNGAVHLYA | 1087 | 0.826 | 0.285 | 0.14 |
| QAQTGLVQN | | | | | HAQTMSVQN | | | | |
| PLDGAVHLYA | 589 | 0.600 | 0.719 | 0.09 | PLNGNVHLYA | 1088 | 0.429 | 0.284 | 0.14 |
| QAQTGWVQI | | | | | QAQTGWVKN | | | | |
| PLNGSVHLYA | 590 | 0.369 | 0.713 | 0.09 | PLNGAVHLYA | 1089 | 0.409 | 0.284 | 0.09 |
| QAQTGSVQT | | | | | QAQTGWVPH | | | | |
| PLNGAVQLYA | 591 | 0.460 | 0.711 | 0.09 | PLNGAVHLYA | 1090 | 0.442 | 0.284 | 0.09 |
| QAQTSSVQN | | | | | QAQPGWGQN | | | | |
| PLNGAVHLYA | 592 | 0.658 | 0.707 | 5.61 | PLNGVVHLYA | 1091 | 0.291 | 0.284 | 0.14 |
| QAQTYAVQN | | | | | QAQTVSVQN | | | | |
| PLNGAVHLYA | 593 | 0.575 | 0.703 | 81.37 | PLNGDVHLYA | 1092 | 0.499 | 0.283 | 0.19 |
| QAQTLSVQN | | | | | QAQTSSVQN | | | | |
| PLNGAVHLYA | 594 | 0.874 | 0.703 | 12.15 | PLNGAVHIYA | 1093 | 0.570 | 0.283 | 0.14 |
| QAQNLPVQN | | | | | QAQTLSVQN | | | | |
| PLNGAVHLYA | 595 | 0.328 | 0.702 | 0.09 | PLNGAVHLYA | 1094 | 0.597 | 0.283 | 0.19 |
| QAQTSSDQN | | | | | QAQIPPVQN | | | | |
| PLNGAVHLYA | 596 | 0.736 | 0.702 | 23.93 | SLNGAVHLYA | 1095 | 0.856 | 0.282 | 1.03 |
| QAQATSVQN | | | | | QAQTGWVQH | | | | |
| TLNGAVHLYA | 597 | 0.353 | 0.701 | 0.23 | PLNAAVHLYA | 1096 | 0.466 | 0.282 | 0.14 |
| QAQLSPVQN | | | | | QAQTGWDQN | | | | |
| PLNGAVHLYA | 598 | 0.271 | 0.700 | 0.14 | PLNGAVHRYA | 1097 | 0.823 | 0.282 | 0.09 |
| QAQTAWFQN | | | | | QAQTTSVQN | | | | |
| TLNGAVHLYA | 599 | 0.801 | 0.700 | 0.09 | PLNGSVHLYA | 1098 | 0.394 | 0.281 | 0.09 |
| QAQVTPVQN | | | | | QAQPGSVQN | | | | |
| TLNGAVHLYA | 600 | 0.202 | 0.696 | 0.09 | PLDGAVHLYA | 1099 | 0.838 | 0.281 | 0.09 |
| QAQTAAVQN | | | | | QAQTGWVEN | | | | |
| PLNGAVHLYA | 601 | 0.801 | 0.693 | 7.76 | PLNGAVHLYA | 1100 | 0.524 | 0.281 | 0.33 |
| QAQATQVQN | | | | | QAQTGRVKN | | | | |
| RLDGAVHLYA | 602 | 0.861 | 0.693 | 8.37 | PLNGAVHLYA | 1101 | 0.435 | 0.281 | 0.33 |
| QAQTGWVQN | | | | | QAQTGRLQN | | | | |
| QLNGAVHLYA | 603 | 0.840 | 0.691 | 0.09 | PLNGSVHLYA | 1102 | 0.584 | 0.281 | 0.28 |
| QAQTGWVEN | | | | | QAQTARVQN | | | | |
| PLNGAVHLYA | 604 | 0.278 | 0.691 | 0.19 | PLNGAVHLYD | 1103 | 0.378 | 0.280 | 0.19 |
| QAQVSSVKN | | | | | QAQLSSVQN | | | | |
| PLNGAVHLYA | 605 | 0.582 | 0.690 | 94.87 | ALNGAVHLYA | 1104 | 0.550 | 0.280 | 0.09 |
| QAQLSSVQN | | | | | QAQTRLVQN | | | | |
| PLNGAVHLYA | 606 | 0.209 | 0.689 | 0.33 | PLNGAVNLYA | 1105 | 0.780 | 0.280 | 0.19 |
| QAQTGSGQN | | | | | QAQTAQVQN | | | | |
| PLNGAVHLYA | 607 | 0.441 | 0.686 | 0.09 | PLNGAVHLYA | 1106 | 0.461 | 0.279 | 0.09 |
| QAQLQPVQT | | | | | QAQLSSVQH | | | | |
| PINGAVHLYA | 608 | 0.805 | 0.686 | 0.09 | PLNGAVHLYA | 1107 | 0.799 | 0.279 | 0.09 |
| QAQLSSVQN | | | | | QAHTGPVQN | | | | |
| PINGAVHLYA | 609 | 0.313 | 0.684 | 0.09 | PLKGAVHLYA | 1108 | 0.872 | 0.279 | 0.09 |
| QAQTVAVQN | | | | | QAQTLSVQN | | | | |
| PLNGAVHLYA | 610 | 0.546 | 0.680 | 0.09 | ALNGAVHLYA | 1109 | 0.499 | 0.279 | 0.09 |
| QAQVSAVKN | | | | | QAQKAWVQN | | | | |
| SLNGAVHLYA | 611 | 0.461 | 0.680 | 0.23 | PLNGAVHLYA | 1110 | 0.386 | 0.278 | 0.09 |
| QAQTVAVQN | | | | | QAQAGWVQT | | | | |
| PLNGAVHLYA | 612 | 0.882 | 0.680 | 22.29 | PLNGAVHLYA | 1111 | 0.709 | 0.278 | 0.19 |
| QAQTQAVQN | | | | | QAQTGLVQS | | | | |
| QLNGAVHLYA | 613 | 0.398 | 0.679 | 0.28 | PLNGAVHLYA | 1112 | 0.436 | 0.277 | 0.14 |
| QAQTAQVQN | | | | | QAQTGCVQI | | | | |
| PLNGAVHLYD | 614 | 0.309 | 0.676 | 0.14 | QLNGAVHLYA | 1113 | 0.529 | 0.276 | 1.26 |
| QAQTMSVQN | | | | | QAQPGWVQN | | | | |
| PLNGAVHLYA | 615 | 0.341 | 0.675 | 0.19 | PLNGAVHLYA | 1114 | 0.678 | 0.276 | 0.37 |
| QPQTGWVQK | | | | | QAQRPGVQN | | | | |
| PLNGAVHLYA | 616 | 0.855 | 0.672 | 30.47 | PLNGAVHLYA | 1115 | 0.265 | 0.276 | 0.09 |
| QAQVMPVQN | | | | | QAQTAAVQH | | | | |
| PLNGAVHLYA | 617 | 0.208 | 0.669 | 0.19 | PLNGADHLYA | 1116 | 0.728 | 0.276 | 0.09 |
| QAQTVSVQK | | | | | QAQTMPVQN | | | | |
| PLNGAVHLYA | 618 | 0.410 | 0.664 | 0.09 | PLNGAVHLYA | 1117 | 0.198 | 0.276 | 0.33 |
| QAQTAWAQN | | | | | KAQTGWVQT | | | | |
| PLNGAVHLYA | 619 | 0.764 | 0.664 | 12.06 | QLNGAVHLYA | 1118 | 0.819 | 0.275 | 0.09 |
| QAQNALVQN | | | | | QAQKAWVQN | | | | |
| TLNGAVHLYA | 620 | 0.217 | 0.663 | 0.09 | PLNGAVHLYA | 1119 | 0.116 | 0.274 | 0.98 |
| QAQVSAVQN | | | | | QAQTGCDQN | | | | |
| PLKGAVHLYA | 621 | 0.611 | 0.663 | 0.09 | PLNGTVHLYA | 1120 | 0.513 | 0.274 | 0.09 |
| QAQTTPVQN | | | | | QEQTGSVQN | | | | |
| QLNGSVHLYA | 622 | 0.776 | 0.657 | 96.83 | PLNGAVNLYA | 1121 | 0.671 | 0.274 | 0.09 |
| QAQTGWVQN | | | | | QAQSSLVQN | | | | |
| SLNGAVHLYA | 623 | 0.307 | 0.650 | 0.09 | ALNGAVHLYA | 1122 | 0.296 | 0.274 | 0,23 |
| QAQVATVQN | | | | | QAQTGWVEN | | | | |
| PLNGAVHLYA | 624 | 0.876 | 0.650 | 9.39 | PLNGTVHLYA | 1123 | 0.405 | 0.274 | 0.14 |
| QAQRMLVQN | | | | | QAQTGWVQY | | | | |
| PLNGAVHLYA | 625 | 0.589 | 0.649 | 0.09 | PINGAVHLYA | 1124 | 0.373 | 0.273 | 0.75 |
| QAQTVAVKN | | | | | QAQTGWVQK | | | | |
| PLNGAVHLYD | 626 | 0.523 | 0.649 | 0.14 | PLNGAVHLYA | 1125 | 0.820 | 0.273 | 0.09 |
| QAQTTSVQN | | | | | QAQTGRVRN | | | | |
| PLNGAVHLYA | 627 | 0.725 | 0.647 | 11.92 | PLNGAVHLYA | 1126 | 0.590 | 0.272 | 0.37 |
| QAQRQLVQN | | | | | QAQTGRDQN | | | | |
| PLNGAVHLYA | 628 | 0.754 | 0.645 | 28.79 | QLNGAVHLYA | 1127 | 0.409 | 0.272 | 0.23 |
| QAQTLGVQN | | | | | QAQSALVQN | | | | |
| PLNGAVHLYA | 629 | 0.889 | 0.645 | 0.09 | PLNGVVHLYA | 1128 | 0.422 | 0.272 | 0.09 |
| QAQLGPVQT | | | | | QAQTGWVQK | | | | |
| PLNGGVHLYA | 630 | 0.554 | 0.644 | 0.14 | PLNGAVHLYA | 1129 | 0.534 | 0.272 | 0.14 |
| QAQTGWVQD | | | | | QAHTGWGQN | | | | |
| PLNGAVHLYA | 631 | 0.205 | 0.640 | 0.98 | PLNGDVHLYA | 1130 | 0.638 | 0.272 | 0.09 |
| QAQTGSVKN | | | | | QAQRSLVQN | | | | |
| PLNGAVNLYA | 632 | 0.332 | 0.635 | 0.09 | PLNGNVHLYA | 1131 | 0.711 | 0.272 | 0.09 |
| QAQLASVQN | | | | | QAQTVWVQN | | | | |
| PLNGAVHLYD | 633 | 0.307 | 0.634 | 0.14 | PLNGAVHLYA | 1132 | 0.332 | 0.272 | 0.23 |
| QAQVSSVQN | | | | | QAPTGWVQH | | | | |
| PLNGAVHLYA | 634 | 0.355 | 0.632 | 0.14 | PLNGAVHLYS | 1133 | 0.725 | 0.271 | 0.23 |
| QAQTMSDQN | | | | | QAQTGWGQN | | | | |
| PLNGAVHLYA | 635 | 0.337 | 0.630 | 17.48 | ALNGSVHLYA | 1134 | 0.729 | 0.271 | 0.09 |
| QAQTGWVQK | | | | | QAQTGWVQT | | | | |
| PLNGAVHLYA | 636 | 0.203 | 0.630 | 0.09 | PLNGAVQLYA | 1135 | 0.347 | 0.271 | 0.09 |
| QAQLASVKN | | | | | QAQRSTVQN | | | | |
| PLNGGVHLYA | 637 | 0.490 | 0.628 | 0.23 | PLNGTVHLYA | 1136 | 0.434 | 0.271 | 0.28 |
| QAQTGWGQN | | | | | QAQTGTVQN | | | | |
| QLNGSVHLYA | 638 | 0.844 | 0.627 | 0.09 | PLNGTVHLYA | 1137 | 0.549 | 0.271 | 0.37 |
| QAQTGWVQT | | | | | QAQTGWVQI | | | | |

TABLE 20
NGS fold-enrichment of TTD-001 matured AAV capsid variants brain and DRG of
cynomolgus macaques and the brain of marmosets

| | | Brain of cynomolgus | | DRG of cynomolgus | | | |
|---|---|---|---|---|---|---|---|
| | | macaques | | macaques | | Brain of marmosets | |
| | | Fold | Fold | Fold | Fold | Fold | Fold |
| | SEQ | change | change | change | change | change | change |
| | ID | relative | relative | relative | relative | relative | relative |
| Sequence | NO | to AAV9 | to TTD-001 | to AAV9 | to TTD-001 | to AAV9 | to TTD-001 |
| ALNGAVHLYAQAQ | 1122 | 12.707 | 0.274 | 0.000 | 0.000 | 420.579 | 571.155 |
| TGWVEN | | | | | | | |
| PINGAVHLYAQAQ | 40 | 8.716 | 0.188 | 2.100 | 13.718 | 573.779 | 779.203 |
| TGWVEN | | | | | | | |
| PLNGAVHLNAQAQ | 41 | 0.919 | 0.020 | 2.175 | 14.212 | 677.878 | 920.572 |
| TGWVEN | | | | | | | |
| PLNGAVHLYAQAQ | 42 | 5.505 | 0.119 | 0.000 | 0.000 | 263.098 | 357.292 |
| SGWVEN | | | | | | | |
| PLNGAVHLYAQAQ | 43 | 8.721 | 0.188 | 0.827 | 5.405 | 236.026 | 320.528 |
| TAWVEN | | | | | | | |
| PLNGAVHLYAQAQ | 44 | 4.126 | 0.089 | 0.245 | 1.603 | 475.164 | 645.282 |
| TGCVEN | | | | | | | |
| PLNGAVHLYAQAQ | 871 | 18.851 | 0.406 | 0.491 | 3.206 | 288.900 | 392.332 |
| TGGVEN | | | | | | | |
| PLNGAVHLYAQAQ | 45 | 5.050 | 0.109 | 0.000 | 0.000 | 541.666 | 735.593 |
| TGLVEN | | | | | | | |
| PLNGAVHLYAQAQ | 818 | 20.878 | 0.450 | 2.856 | 18.662 | 571.096 | 775.559 |
| TGSVEN | | | | | | | |
| PLNGAVHLYAQAQ | 804 | 21.437 | 0.462 | 1.362 | 8.901 | 381.679 | 518.327 |
| TGWVEN | | | | | | | |
| PLNGSVHLYAQAQ | 499 | 43.595 | 0.939 | 2.334 | 15.248 | 490.137 | 665.615 |
| TGWVEN | | | | | | | |
| PVNGAVHLYAQAQ | 46 | 6.311 | 0.136 | 0.000 | 0.000 | 506.376 | 687.669 |
| TGWVEN | | | | | | | |
| QLNGAVHLYAQAQ | 603 | 32.086 | 0.691 | 0.000 | 0.000 | 290.854 | 394.985 |
| TGWVEN | | | | | | | |
| SLNGAVHLYAQAQ | 47 | 8.707 | 0.188 | 2.111 | 13.795 | 302.059 | 410.202 |
| TGWVEN | | | | | | | |
| TLNGAVHLYAQAQ | 48 | 0.707 | 0.015 | 0.624 | 4.074 | 254.330 | 345.385 |
| TGWVEN | | | | | | | |
| ALNGAVHLYAQAQ | 819 | 20.878 | 0.450 | 0.667 | 4.356 | 232.682 | 315.986 |
| TGWVHN | | | | | | | |
| PHNGAVHLYAQAQ | 49 | 3.604 | 0.078 | 4.410 | 28.816 | 177.855 | 241.530 |
| TGWVHN | | | | | | | |
| PINGAVHLYAQAQ | 50 | 6.387 | 0.138 | 1.083 | 7.076 | 124.477 | 169.043 |
| TGWVHN | | | | | | | |
| PLKGAVHLYAQAQ | 51 | 0.986 | 0.021 | 0.516 | 3.368 | 118.166 | 160.472 |
| TGWVHN | | | | | | | |
| PLNGAAHLYAQAQ | 52 | 0.757 | 0.016 | 1.024 | 6.693 | 91.230 | 123.892 |
| TGWVHN | | | | | | | |
| PLNGADHLYAQAQ | 53 | 0.842 | 0.018 | 0.540 | 3.529 | 15.514 | 21.069 |
| TGWVHN | | | | | | | |
| PLNGAGHLYAQAQ | 54 | 1.198 | 0.026 | 1.451 | 9.479 | 106.338 | 144.409 |
| TGWVHN | | | | | | | |
| PLNGALHLYAQAQ | 55 | 2.023 | 0.044 | 0.000 | 0.000 | 148.895 | 202.202 |
| TGWVHN | | | | | | | |
| PLNGAVDLYAQAQ | 56 | 3.104 | 0.067 | 0.000 | 0.000 | 149.296 | 202.747 |
| TGWVHN | | | | | | | |
| PLNGAVHHYAQAQ | 57 | 2.959 | 0.064 | 1.184 | 7.735 | 162.209 | 220.283 |
| TGWVHN | | | | | | | |
| PLNGAVHIYAQAQ | 58 | 2.284 | 0.049 | 0.000 | 0.000 | 160.204 | 217.560 |
| TGWVHN | | | | | | | |
| PLNGAVHLDAQAQ | 59 | 0.667 | 0.014 | 0.333 | 2.175 | 298.308 | 405.108 |
| TGWVHN | | | | | | | |
| PLNGAVHLNAQAQ | 60 | 2.297 | 0.050 | 2.821 | 18.432 | 417.906 | 567.525 |
| TGWVHN | | | | | | | |
| PLNGAVHLSAQAQ | 61 | 1.946 | 0.042 | 1.987 | 12.982 | 427.101 | 580.011 |
| TGWVHN | | | | | | | |
| PLNGAVHLYAKAQ | 62 | 7.514 | 0.162 | 0.000 | 0.000 | 75.629 | 102.705 |
| TGWVHN | | | | | | | |
| PLNGAVHLYAQAK | 63 | 2.441 | 0.053 | 0.998 | 6.522 | 78.923 | 107.179 |
| TGWVHN | | | | | | | |
| PLNGAVHLYAQAQ | 64 | 1.527 | 0.033 | 0.000 | 0.000 | 132.644 | 180.133 |
| AGWVHN | | | | | | | |
| PLNGAVHLYAQAQ | 65 | 4.707 | 0.101 | 0.000 | 0.000 | 24.765 | 33.632 |
| RGWVHN | | | | | | | |
| PLNGAVHLYAQAQ | 66 | 3.622 | 0.078 | 0.000 | 0.000 | 117.858 | 160.053 |
| SGWVHN | | | | | | | |
| PLNGAVHLYAQAQ | 946 | 16.279 | 0.351 | 0.452 | 2.953 | 234.444 | 318.380 |
| TAWVHN | | | | | | | |
| PLNGAVHLYAQAQ | 67 | 4.347 | 0.094 | 0.356 | 2.328 | 255.533 | 347.018 |
| TGCVHN | | | | | | | |
| PLNGAVHLYAQAQ | 491 | 44.261 | 0.954 | 1.261 | 8.238 | 175.856 | 238.815 |
| TGGVHN | | | | | | | |
| PLNGAVHLYAQAQ | 68 | 6.977 | 0.150 | 0.000 | 0.000 | 140.966 | 191.435 |
| TGLVHN | | | | | | | |
| PLNGAVHLYAQAQ | 576 | 34.946 | 0.753 | 2.147 | 14.025 | 187.304 | 254.363 |
| TGSVHN | | | | | | | |
| PLNGAVHLYAQAQ | 755 | 23.437 | 0.505 | 0.865 | 5.655 | 192.126 | 260.911 |
| TGWVHN | | | | | | | |
| PLNGAVHLYAQAQ | 69 | 8.212 | 0.177 | 0.000 | 0.000 | 319.448 | 433.817 |
| VSAVHN | | | | | | | |
| PLNGAVHLYAQEQ | 70 | 2.986 | 0.064 | 0.000 | 0.000 | 93.114 | 126.451 |
| TGWVHN | | | | | | | |
| PLNGAVHLYAQGQ | 71 | 1.725 | 0.037 | 0.000 | 0.000 | 26.926 | 36.566 |
| TGWVHN | | | | | | | |
| PLNGAVHLYDQAQ | 72 | 1.514 | 0.033 | 0.279 | 1.822 | 142.794 | 193.917 |
| TGWVHN | | | | | | | |
| PLNGAVHLYGQAQ | 73 | 1.401 | 0.030 | 0.000 | 0.000 | 116.707 | 158.491 |
| TGWVHN | | | | | | | |
| PLNGAVHLYSQAQ | 74 | 9.806 | 0.211 | 0.000 | 0.000 | 100.716 | 136.775 |
| TGWVHN | | | | | | | |
| PLNGAVHRYAQAQ | 75 | 5.991 | 0.129 | 0.000 | 0.000 | 13.869 | 18.834 |
| TGWVHN | | | | | | | |
| PLNGAVHVYAQAQ | 76 | 2.959 | 0.064 | 0.000 | 0.000 | 159.742 | 216.933 |
| TGWVHN | | | | | | | |
| PLNGAVNLYAQAQ | 77 | 2.387 | 0.051 | 0.631 | 4.121 | 78.989 | 107.268 |
| TGWVHN | | | | | | | |
| PLNGAVPLYAQAQ | 78 | 2.946 | 0.063 | 0.774 | 5.060 | 124.967 | 169.708 |
| TGWVHN | | | | | | | |
| PLNGAVQLYAQAQ | 79 | 2.338 | 0.050 | 1.085 | 7.091 | 105.426 | 143.170 |
| TGWVHN | | | | | | | |
| PLNGGVHLYAQAQ | 979 | 15.473 | 0.333 | 0.626 | 4.090 | 185.552 | 251.984 |
| TGWVHN | | | | | | | |
| PLNGSVHLYAQAQ | 703 | 25.824 | 0.556 | 1.283 | 8.381 | 360.426 | 489.465 |
| TGWVHN | | | | | | | |
| PLNGTVHLYAQAQ | 80 | 10.315 | 0.222 | 0.000 | 0.000 | 159.224 | 216.229 |
| TGWVHN | | | | | | | |
| PRNGAVHLYAQAQ | 81 | 2.842 | 0.061 | 1.016 | 6.636 | 163.614 | 222.192 |
| TGWVHN | | | | | | | |
| PVNGAVHLYAQAQ | 82 | 8.023 | 0.173 | 0.761 | 4.971 | 402.937 | 547.197 |
| TGWVHN | | | | | | | |
| QLNGAVHLYAQAQ | 816 | 21.018 | 0.453 | 0.794 | 5.185 | 344.539 | 467.890 |
| TGWVHN | | | | | | | |
| SLNGAVHLYAQAQ | 83 | 8.378 | 0.181 | 1.286 | 8.399 | 211.470 | 287.181 |
| TGWVHN | | | | | | | |
| TLNGAVHLYAQAQ | 84 | 1.270 | 0.027 | 0.252 | 1.648 | 136.758 | 185.720 |
| TGWVHN | | | | | | | |
| ALNGAVHLYAQAQ | 1081 | 13.477 | 0.290 | 0.084 | 0.546 | 9.629 | 13.077 |
| TGWVKN | | | | | | | |
| ALNGAVNLYAQAQ | 85 | 4.203 | 0.091 | 0.000 | 0.000 | 3.919 | 5.323 |
| TGWVKN | | | | | | | |
| KLNGAVHLYAQAQ | 86 | 7.153 | 0.154 | 0.000 | 0.000 | 9.576 | 13.004 |
| TGWVKN | | | | | | | |
| PHNGAVHLYAQAQ | 87 | 1.248 | 0.027 | 0.378 | 2.467 | 5.661 | 7.688 |
| TGWVKN | | | | | | | |
| PINGAVHLYAQAQ | 88 | 7.644 | 0.165 | 0.143 | 0.933 | 7.560 | 10.267 |
| TGWVKN | | | | | | | |
| PLKGAVHLYAQAQ | 89 | 0.748 | 0.016 | 0.103 | 0.675 | 7.088 | 9.626 |
| TGWVKN | | | | | | | |
| PLNAAVHLYAQAQ | 90 | 2.473 | 0.053 | 0.000 | 0.000 | 18.662 | 25.343 |
| TGWVKN | | | | | | | |
| PLNGAAHLYAQAQ | 91 | 0.901 | 0.019 | 0.390 | 2.547 | 5.894 | 8.004 |
| TGWVKN | | | | | | | |
| PLNGADHLYAQAQ | 92 | 3.270 | 0.070 | 0.316 | 2.064 | 0.970 | 1.317 |
| TGWVKN | | | | | | | |
| PLNGAGHLYAQAQ | 93 | 0.378 | 0.008 | 0.209 | 1.367 | 11.306 | 15.354 |
| TGWVKN | | | | | | | |
| PLNGALHLYAQAQ | 859 | 19.306 | 0.416 | 0.059 | 0.387 | 19.870 | 26.984 |
| TGWVKN | | | | | | | |
| PLNGAVDLYAQAQ | 94 | 0.937 | 0.020 | 0.000 | 0.000 | 5.016 | 6.812 |
| TGWVKN | | | | | | | |
| PLNGAVHHYAQAQ | 95 | 1.572 | 0.034 | 0.122 | 0.800 | 8.227 | 11.173 |
| TGWVKN | | | | | | | |
| PLNGAVHIYAQAQ | 96 | 11.752 | 0.253 | 0.310 | 2.024 | 10.015 | 13.600 |
| TGWVKN | | | | | | | |
| PLNGAVHLDAQAQ | 97 | 0.455 | 0.010 | 0.132 | 0.864 | 14.604 | 19.832 |
| TGWVKN | | | | | | | |
| PLNGAVHLNAQAQ | 98 | 1.725 | 0.037 | 0.739 | 4.830 | 21.040 | 28.572 |
| TGWVKN | | | | | | | |
| PLNGAVHLSAQAQ | 99 | 0.653 | 0.014 | 0.523 | 3.415 | 16.268 | 22.092 |
| TGWVKN | | | | | | | |
| PLNGAVHLYAEAQ | 100 | 0.752 | 0.016 | 0.000 | 0.000 | 0.825 | 1.120 |
| TGWVKN | | | | | | | |
| PLNGAVHLYAHAQ | 101 | 8.658 | 0.187 | 0.345 | 2.253 | 1.734 | 2.355 |
| TGWVKN | | | | | | | |
| PLNGAVHLYAKAQ | 649 | 28.559 | 0.615 | 0.278 | 1.817 | 1.532 | 2.081 |
| TGWVKN | | | | | | | |
| PLNGAVHLYALAQ | 102 | 2.311 | 0.050 | 0.000 | 0.000 | 9.892 | 13.433 |
| TGWVKN | | | | | | | |
| PLNGAVHLYAPAQ | 103 | 3.766 | 0.081 | 0.000 | 0.000 | 5.697 | 7.737 |
| TGWVKN | | | | | | | |
| PLNGAVHLYAQAE | 104 | 0.360 | 0.008 | 0.213 | 1.394 | 2.738 | 3.718 |
| TGWVKN | | | | | | | |
| PLNGAVHLYAQAQ | 105 | 7.865 | 0.169 | 0.099 | 0.648 | 1.486 | 2.018 |
| KGWVKN | | | | | | | |
| PLNGAVHLYAQAQ | 566 | 36.293 | 0.782 | 0.000 | 0.000 | 134.753 | 182.997 |
| LSPVKN | | | | | | | |
| PLNGAVHLYAQAQ | 960 | 15.955 | 0.344 | 0.000 | 0.000 | 51.408 | 69.813 |
| LSSVKN | | | | | | | |
| PLNGAVHLYAQAQ | 106 | 10.171 | 0.219 | 0.000 | 0.000 | 13.928 | 18.914 |
| PGWVKN | | | | | | | |
| PLNGAVHLYAQAQ | 107 | 3.450 | 0.074 | 0.000 | 0.000 | 7.922 | 10.758 |
| SGWVKN | | | | | | | |
| PLNGAVHLYAQAQ | 108 | 11.748 | 0.253 | 0.000 | 0.000 | 8.691 | 11.802 |
| SSLVKN | | | | | | | |
| PLNGAVHLYAQAQ | 109 | 5.856 | 0.126 | 0.169 | 1.107 | 10.452 | 14.194 |
| SSSVKN | | | | | | | |
| PLNGAVHLYAQAQ | 110 | 4.473 | 0.096 | 0.000 | 0.000 | 14.173 | 19.247 |
| TACVKN | | | | | | | |
| PLNGAVHLYAQAQ | 763 | 23.248 | 0.501 | 0.000 | 0.000 | 11.433 | 15.526 |
| TASVKN | | | | | | | |
| PLNGAVHLYAQAQ | 828 | 20.599 | 0.444 | 0.333 | 2.174 | 6.667 | 9.054 |
| TAWVKN | | | | | | | |
| PLNGAVHLYAQAQ | 111 | 0.721 | 0.016 | 0.000 | 0.000 | 14.566 | 19.781 |
| TEWVKN | | | | | | | |
| PLNGAVHLYAQAQ | 112 | 8.239 | 0.178 | 0.000 | 0.000 | 10.794 | 14.659 |
| TGAVKN | | | | | | | |
| PLNGAVHLYAQAQ | 113 | 8.144 | 0.175 | 0.222 | 1.452 | 14.865 | 20.187 |
| TGCVKN | | | | | | | |
| PLNGAVHLYAQAQ | 529 | 40.644 | 0.876 | 0.167 | 1.092 | 8.407 | 11.417 |
| TGGVKN | | | | | | | |
| PLNGAVHLYAQAQ | 114 | 10.090 | 0.217 | 0.145 | 0.945 | 10.946 | 14.864 |
| TGLVKN | | | | | | | |
| PLNGAVHLYAQAQ | 1100 | 13.059 | 0.281 | 0.000 | 0.000 | 2.607 | 3.541 |
| TGRVKN | | | | | | | |
| PLNGAVHLYAQAQ | 631 | 29.707 | 0.640 | 0.516 | 3.369 | 7.169 | 9.735 |
| TGSVKN | | | | | | | |
| PLNGAVHLYAQAQ | 765 | 23.167 | 0.499 | 0.260 | 1.700 | 10.937 | 14.852 |
| TGWVKN | | | | | | | |
| PLNGAVHLYAQAQ | 720 | 25.032 | 0.539 | 1.771 | 11.569 | 10.981 | 14.913 |
| TLSVKN | | | | | | | |
| PLNGAVHLYAQAQ | 1033 | 14.369 | 0.310 | 1.308 | 8.546 | 1.210 | 1.643 |
| TRWVKN | | | | | | | |
| PLNGAVHLYAQAQ | 700 | 26.099 | 0.562 | 0.000 | 0.000 | 29.844 | 40.528 |
| TSSVKN | | | | | | | |
| PLNGAVHLYAQAQ | 1037 | 14.347 | 0.309 | 0.000 | 0.000 | 12.484 | 16.953 |
| TSTVKN | | | | | | | |
| PLNGAVHLYAQAQ | 115 | 4.212 | 0.091 | 0.000 | 0.000 | 34.651 | 47.056 |
| TSWVKN | | | | | | | |
| PLNGAVHLYAQAQ | 625 | 30.131 | 0.649 | 0.000 | 0.000 | 22.666 | 30.781 |
| TVAVKN | | | | | | | |
| PLNGAVHLYAQAQ | 325 | 69.266 | 1.492 | 0.231 | 1.508 | 22.335 | 30.332 |
| TVSVKN | | | | | | | |
| PLNGAVHLYAQAQ | 771 | 22.784 | 0.491 | 0.000 | 0.000 | 1.612 | 2.189 |
| TVWVKN | | | | | | | |
| PLNGAVHLYAQAQ | 610 | 31.581 | 0.680 | 0.354 | 2.310 | 21.595 | 29.326 |
| VSAVKN | | | | | | | |
| PLNGAVHLYAQAQ | 558 | 37.158 | 0.801 | 0.000 | 0.000 | 40.525 | 55.033 |
| VSPVKN | | | | | | | |
| PLNGAVHLYAQEQ | 116 | 7.694 | 0.166 | 0.000 | 0.000 | 1.548 | 2.102 |
| TGWVKN | | | | | | | |
| PLNGAVHLYAQSQ | 117 | 7.014 | 0.151 | 0.000 | 0.000 | 5.931 | 8.054 |
| TGWVKN | | | | | | | |
| PLNGAVHLYDQAQ | 118 | 2.761 | 0.059 | 0.146 | 0.956 | 7.745 | 10.518 |
| TGWVKN | | | | | | | |
| PLNGAVHLYEQAQ | 119 | 7.658 | 0.165 | 0.000 | 0.000 | 7.124 | 9.675 |
| TGWVKN | | | | | | | |
| PLNGAVHLYGQAQ | 120 | 0.874 | 0.019 | 0.000 | 0.000 | 5.745 | 7.802 |
| TGWVKN | | | | | | | |
| PLNGAVHLYSQAQ | 121 | 6.910 | 0.149 | 0.000 | 0.000 | 11.682 | 15.865 |
| TGLVKN | | | | | | | |
| PLNGAVHLYSQAQ | 122 | 7.536 | 0.162 | 0.245 | 1.599 | 4.415 | 5.996 |
| TGWVKN | | | | | | | |
| PLNGAVHLYTQAQ | 123 | 0.595 | 0.013 | 0.166 | 1.086 | 10.157 | 13.793 |
| TGWVKN | | | | | | | |
| PLNGAVHPYAQAQ | 124 | 0.788 | 0.017 | 0.178 | 1.162 | 3.527 | 4.790 |
| TGWVKN | | | | | | | |
| PLNGAVHRSLQAQ | 125 | 0.153 | 0.003 | 0.449 | 2.931 | 7.938 | 10.780 |
| TGWVKN | | | | | | | |
| PLNGAVHRYAQAQ | 126 | 1.878 | 0.040 | 0.000 | 0.000 | 2.446 | 3.322 |
| TGWVKN | | | | | | | |
| PLNGAVHVYAQAQ | 127 | 1.937 | 0.042 | 0.123 | 0.802 | 7.871 | 10.689 |
| TGWVKN | | | | | | | |
| PLNGAVLLYAQAQ | 128 | 4.149 | 0.089 | 0.211 | 1.379 | 3.878 | 5.266 |
| TGWVKN | | | | | | | |
| PLNGAVNLYAQAQ | 129 | 3.505 | 0.076 | 0.000 | 0.000 | 1.145 | 1.555 |
| TGCVKN | | | | | | | |
| PLNGAVNLYAQAQ | 130 | 4.586 | 0.099 | 0.262 | 1.710 | 2.124 | 2.884 |
| TGWVKN | | | | | | | |
| PLNGAVNLYDQAQ | 131 | 2.486 | 0.054 | 0.000 | 0.000 | 9.468 | 12.858 |
| TGWVKN | | | | | | | |
| PLNGAVPLYAQAQ | 132 | 1.622 | 0.035 | 0.000 | 0.000 | 7.002 | 9.509 |
| TGWVKN | | | | | | | |
| PLNGAVQLYAQAQ | 133 | 2.014 | 0.043 | 0.381 | 2.487 | 11.888 | 16.145 |
| TGWVKN | | | | | | | |
| PLNGAVRSTAQAQ | 134 | 0.505 | 0.011 | 0.662 | 4.326 | 24.950 | 33.883 |
| TGWVKN | | | | | | | |
| PLNGAVSLRAQAQ | 135 | 0.725 | 0.016 | 1.267 | 8.277 | 6.291 | 8.543 |
| TGWVKN | | | | | | | |
| PLNGAVSSRAQAQ | 136 | 0.739 | 0.016 | 1.091 | 7.130 | 19.478 | 26.452 |
| TGWVKN | | | | | | | |
| PLNGDVHLYAQAQ | 14 | 2.905 | 0.063 | 0.000 | 0.000 | 10.919 | 14.829 |
| TGCVKN | | | | | | | |
| PLNGDVHLYAQAQ | 15 | 2.559 | 0.055 | 0.235 | 1.539 | 9.737 | 13.224 |
| TGWVKN | | | | | | | |
| PLNGGVHLYAQAQ | 864 | 19.077 | 0.411 | 0.292 | 1.905 | 4.576 | 6.214 |
| TGWVKN | | | | | | | |
| PLNGPVHLYAQAQ | 16 | 2.216 | 0.048 | 0.000 | 0.000 | 5.169 | 7.019 |
| TGWVKN | | | | | | | |
| PLNGSVHLYAQAQ | 17 | 5.707 | 0.123 | 0.000 | 0.000 | 21.281 | 28.900 |
| TGCVKN | | | | | | | |
| PLNGSVHLYAQAQ | 791 | 22.050 | 0.475 | 0.184 | 1.202 | 13.110 | 17.803 |
| TGWVKN | | | | | | | |
| PLNGTVHLYAQAQ | 978 | 15.482 | 0.334 | 0.000 | 0.000 | 17.576 | 23.868 |
| TGWVKN | | | | | | | |
| PLNSAVHLYAQAQ | 1174 | 1.468 | 0.032 | 0.000 | 0.000 | 3.674 | 4.989 |
| TGWVKN | | | | | | | |
| PLSGAVHLYAQAQ | 1175 | 0.680 | 0.015 | 0.000 | 0.000 | 8.111 | 11.015 |
| TGWVKN | | | | | | | |
| PPNGAVHLYAQAQ | 1176 | 0.829 | 0.018 | 0.546 | 3.567 | 9.008 | 12.233 |
| TGWVKN | | | | | | | |
| PRNGAVHLYAQAQ | 1177 | 1.194 | 0.026 | 0.421 | 2.751 | 9.143 | 12.417 |
| TGWVKN | | | | | | | |
| PVNGAVHLYAQAQ | 1178 | 8.167 | 0.176 | 0.145 | 0.946 | 11.979 | 16.268 |
| TGWVKN | | | | | | | |
| QLNGAVHIYAQAQ | 1179 | 6.982 | 0.150 | 0.000 | 0.000 | 14.405 | 19.563 |
| TGWVKN | | | | | | | |
| QLNGAVHLYAQAQ | 1180 | 2.446 | 0.053 | 0.000 | 0.000 | 14.453 | 19.627 |
| TGCVKN | | | | | | | |
| QLNGAVHLYAQAQ | 1181 | 7.518 | 0.162 | 0.000 | 0.000 | 1.613 | 2.190 |
| TGLVKN | | | | | | | |
| QLNGAVHLYAQAQ | 966 | 15.815 | 0.341 | 1.130 | 7.380 | 3.272 | 4.443 |
| TGSVKN | | | | | | | |
| QLNGAVHLYAQAQ | 1032 | 14.378 | 0.310 | 0.137 | 0.893 | 10.495 | 14.253 |
| TGWVKN | | | | | | | |
| QLNGAVHLYDQAQ | 1182 | 2.378 | 0.051 | 0.000 | 0.000 | 1.224 | 1.663 |
| TGWVKN | | | | | | | |
| RLNGAVHLYAQAQ | 1183 | 3.131 | 0.067 | 0.000 | 0.000 | 4.894 | 6.646 |
| TGWVKN | | | | | | | |
| SINGAVHLYAQAQ | 1184 | 1.234 | 0.027 | 0.409 | 2.671 | 4.660 | 6.328 |
| TGWVKN | | | | | | | |
| SLNGAVHLYAQAQ | 1185 | 6.104 | 0.132 | 0.328 | 2.143 | 11.122 | 15.104 |
| TGWVKN | | | | | | | |
| SLNGAVNLYAQAQ | 1186 | 1.387 | 0.030 | 0.833 | 5.444 | 5.215 | 7.083 |
| TGWVKN | | | | | | | |
| TLNGAVHLYAQAQ | 1187 | 2.176 | 0.047 | 0.108 | 0.707 | 5.355 | 7.272 |
| TGWVKN | | | | | | | |
| TLNGAVNLYAQAQ | 1188 | 1.333 | 0.029 | 0.000 | 0.000 | 1.292 | 1.754 |
| TGWVKN | | | | | | | |
| PLNGAVHHYAQAQ | 1189 | 0.937 | 0.020 | 0.000 | 0.000 | 982.466 | 1334.208 |
| TGWVPN | | | | | | | |
| PLNGAVHLNAQAQ | 1190 | 3.698 | 0.080 | 3.072 | 20.072 | 5448.821 | 7399.606 |
| TGWVPN | | | | | | | |
| PLNGAVHLSAQAQ | 1191 | 3.356 | 0.072 | 3.362 | 21.966 | 5527.158 | 7505.989 |
| TGWVPN | | | | | | | |
| PLNGAVHLYAQAQ | 1192 | 8.959 | 0.193 | 0.969 | 6.329 | 3019.591 | 4100.664 |
| TGCVPN | | | | | | | |
| PLNGAVHLYAQAQ | 314 | 71.770 | 1.546 | 2.071 | 13.534 | 2408.300 | 3270.518 |
| TGWVPN | | | | | | | |
| PLNGAVNLYAQAQ | 1193 | 5.356 | 0.115 | 1.809 | 11.822 | 2103.432 | 2856.501 |
| TGWVPN | | | | | | | |
| PLNGTVHLYAQAQ | 885 | 18.270 | 0.394 | 0.000 | 0.000 | 4688.758 | 6367.425 |
| TGWVPN | | | | | | | |
| PVNGAVHLYAQAQ | 1016 | 14.568 | 0.314 | 0.000 | 0.000 | 1269.496 | 1724.000 |
| TGWVPN | | | | | | | |
| QLNGAVHLYAQAQ | 648 | 28.572 | 0.616 | 0.000 | 0.000 | 14152.524 | 19219.405 |
| TGWVPN | | | | | | | |
| SLNGAVHLYAQAQ | 1058 | 13.914 | 0.300 | 1.876 | 12.256 | 1800.081 | 2444.545 |
| TGWVPN | | | | | | | |
| PLNGAVHLYAQAQ | 476 | 46.410 | 1 | 0.153 | 1 | 0.736 | 1 |
| TGWVQN | | | | | | | |
| AQAQAQTGWVQN | 1194 | 1 | 0.0215 | 1 | 6.533 | 1 | 1.358 |

### Example 8. Maturation of TTD-001 Capsid in Mice

[2170] This Example describes maturation of the TTD-001 (SEQ ID NO: 3623 (DNA) and 3636 (amino acid), comprising SEQ ID NO: 1725 or 3648) capsid variant to further enhance its transduction and biodistribution in the central nervous system and evolve the AAV capsid variants in mice. Two approaches were used to mature the TTD-001 capsid sequence in order to randomize and mutate within and around the peptide insert comprised within loop VIII of the capsid variant. In the first maturation approach, sets of three contiguous amino acids were randomized across the mutagenesis region in the TTD-001 sequence, which spanned from position 587 to position 602, numbered according to SEQ ID NO: 3636. In the second maturation approach, mutagenic primers were used to introduce point mutations at a low frequency, scattered across the mutagenesis region in the TTD-001 sequences ranging from position 587 to position 602, numbered according to SEQ ID NO: 3636. AAV capsid variants arising from each maturation approach for TTD-001 were pooled together, for subsequent testing and characterization in mice.

[2171] The library of pooled matured AAV capsid variants generated from TTD-001 matured AAV capsid variant were injected into 3 mice. After a period in life, the brains of the mice were isolated and RNA was extracted. Following RNA recovery and RT-PCR amplification, a systematic NGS enrichment analysis was performed to calculate the fold enrichment ratio relative to an AAV9 control, and the peptides comprised within the variants were identified. The coefficient of variance (CV) was calculated for each peptide across the samples isolated from the mice, and those that had a CV value <1 were identified, as these were the peptides that were reliably detected in most or all of the brain samples isolated from the mice. These TTD-001 matured capsid variants and their peptide sequences are provided in Table 11.

[2172] Over 3000 TTD-001 matured capsid variants demonstrated increased expression relative to the wild-type AAV9 control. As shown in Table 11, approximately 34 demonstrated greater than a ten-fold enrichment relative to the wild-type AAV9 control. Also, across the peptides comprised within the TTD-001 matured capsid variants with the greatest fold-enrichment relative to the wild-type AAV9 control capsid in the mouse brain, it was observed that the modifications in the variant sequences appeared in the middle of the sequence, specifically at residues corresponding to positions 591-593, relative to a reference sequence numbered according to the amino acid sequence of SEQ ID NO: 3636.

[2173] Taken together, these data demonstrate that following two maturation approaches, matured TTD-001 capsid variants with loop VIII modifications were generated with significantly enhanced CNS tropism in mice compared to a wild-type AAV9 control capsid.

TABLE 11
NGS fold-enrichment of TTD-001 matured AAV
capsid variants in the brains of mice

| | SEQ | | Fold |
|---|---|---|---|
| | ID | | enrichment |
| Peptide Sequence | NO: | CV | over AAV9 |
| PLNNPGHLYAQAQTGW | 1139 | 0.696 | 94.10 |
| PLNGVKALYAQAQTGW | 1140 | 0.047 | 78.63 |
| PLNGARMIYAQAQTGW | 1141 | 0.530 | 66.48 |
| PLNGVKMLYAQAQTGW | 1142 | 0.203 | 60.88 |
| PLNGVRALYAQAQTGW | 1143 | 0.674 | 60.72 |
| PLNGVRSLYAQAQTGW | 1144 | 0.400 | 52.99 |
| PLNGTRMLYAQAQTGW | 1145 | 0.517 | 50.75 |
| PLNGVRTLYAQAQTGW | 1146 | 0.698 | 42.02 |
| PLNGVRMLYAQAQTGW | 1147 | 0.678 | 31.62 |
| PLNGARMLYAQAQTGW | 1148 | 0.186 | 30.79 |
| PLNGAKMLYAQAQTGW | 1149 | 0.318 | 28.20 |
| PLNGVKSLYAQAQTGW | 1150 | 0.284 | 27.59 |
| PLNGVQMLYAQAQTGW | 1151 | 0.316 | 27.39 |
| PSARAVHLYAQAQTGW | 1152 | 0.893 | 24.75 |
| PLNGTRSLYAQAQTGW | 1153 | 0.459 | 21.66 |
| PLNGVRQLYAQAQTGW | 1154 | 0.190 | 20.62 |
| PLNGAQMLYAQAQTGW | 1155 | 0.295 | 19.61 |
| PLNGVKYLYAQAQTGW | 1156 | 0.842 | 19.25 |
| PLNGARTIYAQAQTGW | 1157 | 0.371 | 17.48 |
| TLNGAVHLNAQGQTGW | 1158 | 0.891 | 16.19 |
| PLNGAGADYAQAQTGW | 1159 | 0.768 | 15.41 |
| PLNMPGHLYAQAQTGW | 1160 | 0.729 | 14.98 |
| PLNGVQALYAQAQTGW | 1161 | 0.359 | 13.56 |
| SLNGAVHLYVQAQTGS | 1162 | 0.866 | 12.73 |
| PLNGVKTLYAQAQTGW | 1163 | 0.239 | 12.54 |
| SLNGAVHLSAQAQAGW | 1164 | 0.920 | 12.45 |
| SINGPVHLYAQAQTGW | 1165 | 0.409 | 12.14 |
| PLNGGVHLSVQAQTGW | 1166 | 0.979 | 12.10 |
| PLNGAGHLNAQAQTRW | 1167 | 0.983 | 11.71 |
| ALNGAVHVSAQAQTGW | 1168 | 0.645 | 10.75 |
| PLNLVGHLYAQAQTGW | 1169 | 0.872 | 10.63 |
| PLNLTGHLYAQAQTGW | 1170 | 0.341 | 10.38 |
| PGRQAVHLYAQAQTGW | 1171 | 0.971 | 10.13 |
| LVNSTVRLNAQVQTGW | 1172 | 0.878 | 10.04 |
| AQAQAQTGW | 1173 | 0.299 | 1.0 |

### Example 9. Optimization of rAAV Particle Formulations

[2174] The aim of this experiment was to obtain a formulation that could support a viral concentration >1×10¹³ vg/mL, minimize aggregation (e.g., to <5%, as assessed by SEC-FLD), and maintain osmolality within a certain range (e.g., about 250-600 mOsm/kg for isotonic solutions) under various storage conditions. An AAV9 variant (TTD-001) with an SEAP/GFP payload was used in these experiments.

[2175] Various parameters of a modified PBS-based formulation (PBS and 0.001% Pluronic F68, pH7.4) for therapeutic recombinant AAV particles comprising an AAV9 capsid or AAV9 capsid variant (or variants thereof), e.g., an AAV capsid variant described herein, including excipients, crowding agents, pH, and osmolality, were altered and tested for their impact as discussed below.

[2176] Stability of the new formulations was tested under various conditions, including storage at −80° C., 2-8° C., room temperature (25° C.), as well as under multiple freeze thaw cycles. Other characteristics of the formulations were also examined as follows: pH (pH meter), osmolality (osmometer), VP1,2,3% purity (capillary gel electrophoresis-sodium dodecyl sulfate (CE-SDS)), pI/surface charge (capillary isoelectric focusing (CIEF)), vector titer (qPCR), sub-μm aggregation (size exclusion chromatography-fluorescence detection (SEC-FLD)/dynamic light scattering (DLS)), and % occupancy (SEC-MALS).

[2177] Components of the tested formulations are shown in Table 12.

TABLE 12
Formulation components

| | |
|---|---|
| Modified PBS | PBS, pH 7.4 |
| | 0.001% Pluronic F-68 |
| 1% glycerol | 20 mM Tris, pH 8.0 |
| | 62.5 mM NaCl |
| | 1% Glycerol |
| | 0.001% Pluronic F-68 |
| 2.5% glycerol | 20 mM Tris, pH 8.0 |
| | 62.5 mM NaCl |
| | 2.5% Glycerol |
| | 0.001% Pluronic F-68 |
| 5.95% trehalose | 20 mM Tris, pH 8.0 |
| | 62.5 mM NaCl |
| | 5.95% Trehalose |
| | 0.001% Pluronic F-68 |

[2178] The analysis of VP1,2,3 ratio and % purity of TTD-001 in buffer exchanged samples was performed as follows. Briefly, 100 μl of sample was combined with 350 μl SDS sample buffer and added to a pretreated Amicon Ultra 0.5 ml Centrifugal Spin Filter (10 kDa). Samples were spun, filters were inverted into a new collection tube and spun, and the volume was brought up to 95 μl with SDS sample buffer. 2 μl of 10 kDa internal standard and 5 μL of iodoacetamide (IAM) were added to each sample and they were alkylated by heating to 70° C. for 3 minutes before cooling to room temperature. Samples were then transferred to CE vial with a PCR tube inside for analysis by CE-SDS.

[2179] With the exception of the sample in modified PBS (for which the signal was significantly lower than the other samples, likely due to loss of material following aggregation), all buffer exchanged samples retained the VP1,2,3 ratios of the original starting material. Properties of the buffer exchanged formulations at time 0 and at 3 months (for samples stored at −80° C. and 2-8° C.) are shown in Table 13 (VP ratio and % purity). Storage at −80° C. over 3 months had no impact based on VP ratio or % purity. With storage at 2-8° C., a significant impact on the capsid structure emerged over 2 weeks, seen as additional peaks (possible clipped VPs) in CESDS electropherograms and decrease in overall % purity (Table 13). The average VP ratios also shifted, seen with a drop in VP1 levels, likely due to increased loss of capsids with higher VP1 content. Under each condition, the signal for the modified PBS formulation in CESDS electropherograms remained an order of magnitude lower (reflected by differences in titer), suggesting degradation was prevalent.

TABLE 13
Capsid parameters

| | t = 0 | | t = 3 months (−80° C.) | | t = 3 months (2-8° C.) | |
|---|---|---|---|---|---|---|
| Sample | VP Ratio* | % Purity | VP Ratio | % Purity | VP Ratio | % Purity |
| Modified PBS | 32:2:1 | 100 | 47:2:1 | 93.6 | 54:2:1 | 100 |
| 5.95% Trehalose | 32:2:1 | 100 | 34:2:1 | 97.3 | 82:3:1 | 61.3 |
| 2.5% Glycerol | 31:2:1 | 100 | 32:2:1 | 100 | 60:3:1 | 81.6 |
| 1% Glycerol | 30:2:1 | 100 | 28:2:1 | 100 | 57:3:1 | 87.7 |

*VP ratios presented as VP3:VP2:VP1

[2180] Table 14 shows pI parameters (Central pI value, pI range, and area %) of samples that have been buffer exchanged, as assessed by cIEF. Briefly, 10 μl of each sample was mixed with 200 μl of cIEF master mix. In tandem, 200 μl of cIEF master mix was added to 1.0 μl of pI markers 5.5, 7.0, and 9.5. Formulation samples and marker standards were centrifuged, and 200 μl from each were added to a CE vial with a PCR tube inside for analysis by cIEF.

[2181] With the exception of the modified PBS formulation, which caused significant loss of signal (as reflected in qPCR measurements) along with a shift to higher pI values, the three formulations (5.95% trehalose, 2.5% glycerol, and 1% glycerol) retained the same charge profile as the original material, with a strong signal at the expected pI range.

TABLE 14
pI parameters

| | t = 0 | | | t = 3 months (−80° C.) | | | t = 3 months (2-8° C.) | | |
|---|---|---|---|---|---|---|---|---|---|
| | Central | pI | Area | Central | pI | Area | Central | pI | Area |
| Sample | pI value | range | % | pI value | range | % | pI value | range | % |
| Modified PBS | 7.4 | 7.1-7.8 | 100.0 | 6.5 | 6.2-7.5 | 100.0 | 6.4 | 6.2-6.6 | 100.0 |
| 5.95% Trehalose | 6.5 | 6.2-6.7 | 100.0 | 6.2 | 6.0-6.5 | 100.0 | 6.0 | 5.9-6.2 | 100.0 |
| 2.5% Glycerol | 6.5 | 6.2-6.7 | 100.0 | 6.2 | 6.0-6.5 | 100.0 | 6.0 | 5.9-6.2 | 100.0 |
| 1% Glycerol | 6.4 | 6.2-6.7 | 100.0 | 6.2 | 5.8-6.6 | 100.0 | 6.0 | 5.9-6.2 | 100.0 |

[2182] Tables 15-19 and FIGS. 13A-13D, 14A-14D, and 15A-15D show the various properties of the tested formulations and TTD-001 particles, including pH, osmolality, titer, aggregation, and occupancy. pH was assessed using a pH meter, and osmolality with an osmometer.

[2183] Viral titer for each sample was determined through qPCR. Briefly 5 μl of each sample was combined with 95 μl of DNase reaction mixture (0.3 mg/mL DNase I in QPCR DNase buffer) in a 96-well PCR plate and incubated at 37° C. for 1 hour to remove any external DNA. 125 μl of proteinase K mixture (0.96 mg/mL proteinase K and 20 mM EDTA in QPCR proteinase K buffer) was added to each sample. The plate was incubated at 55° C. for 1 hour and 95° C. for 10 minutes, to deactivate the DNase I and denature the capsid, releasing the DNA. 4 μl of each sample and standard were combined with 16 μl qPCR master mix (1.25× Taqman fast advanced master mix, 1.25× primer probe mixture in nuclease free water). The plate was placed inside a light cycler 480 instrument and the following cycling program was used: Denature (95° C. 10 minutes), Cycle 45 times (95° C. 10 seconds, 60° C. 10 seconds, 72° C. 10 seconds). This was followed by acquisition of the fluorescent signals on the final step. The data were processed using the light cycler 480 software to generate titer values in vg/ml.

[2184] Genomic integrity in terms of the number of bands and relative intensity was measured using an agarose gel run under alkaline denaturing conditions with SYBR gold fluorescent staining. Briefly a 1% agarose gel was cast in 1×Tris acetate EDTA (TAE) solution. 10 μl of each sample was combined with 10 μl 2× denaturing loading dye and the samples were heated to 95° C. for 10 minutes and cooled to room temperature. From this, 10 μl of each sample mixture was loaded into separate wells along with 5 μl generuler as a size ladder. The gel was run at 40V for 16 hours at 2-8° C. Following a wash with 1×TAE solution, it was stained using SYBR gold solution and imaged using a blue filter (460 nm). The size and band intensities were determined using image J software.

[2185] As shown in the Tables and FIGS. 13A-13G, the addition of glycerol and trehalose improved viral titers and genomic integrity across various stability tests compared to the modified PBS formulation, including samples stored at −80° C., 2-8° C., and room temperature, and under multiple rounds of freeze thaw. When titer values were plotted as a function of time and separated into the individual temperature arms, the glycerol-containing formulations and trehalose-containing formulation were able to maintain titers of 1E+13 VG/ml across each condition, i.e., −80° C., 2-8° C., 25° C., and under 6 freeze thaw cycles (FIG. 13E). Moreover, these titers were maintained at day 90 for the −80° C. and 2-8° C. conditions (FIGS. 13F and 13G). In DNA denaturing gel analysis, while all samples showed two DNA species (4.0 & 3.0 kbp), the main DNA species intensity was greater in the glycerol-containing formulations (1% and 2.5%) and 5.95% trehalose-containing formulation compared to the modified PBS formulation. No significant loss in intensity or emergence of additional species was observed for the glycerol-containing formulations and trehalose-containing formulation for time points spanning 2 weeks and 6 freeze thaw cycles.

[2186] Aggregation (% HMW) and occupancy (% full AAV capsids) were assessed using SEC-FLD and SEC-MALS. This assay utilizes size exclusion chromatography to separate AAV monomers from HMW aggregates, thereby quantifying the latter using the integrals of the fluorescent signal. Online multi-angle light scattering combined with refractive index measurements were used to determine the molar mass, geometry, and protein fraction of the aggregates. % Full was measured by using differences in the extinction coefficients at 280 nm to deconvolute the molar mass of the monomer into contributions from the protein (capsid) and payload (DNA). Briefly, sample were added to HPLC vials and loaded in an HPLC autosampler at 4° C. Samples were run on a 7.8×300 mm, 500 Å column with the following HPLC method parameters: instrument method (SEC 260 and 280), Pump (1.0 ml/min SEC mobile phase (2×DPBS, pH7.5)), Injection (50 μl of H₂O, formulation buffer, reference standard or sample), run time (20 min), DAD UV (280 nM), VWD UV (260 nM), FLD (Ex=280 Em=350, PMT gain=8), column temp (25° C.). Data (fluorescent signal) was analyzed using Chemstation. The signal was integrated manually from 4.5 to 10 minutes, and the integrated area was split using the split peak function to separate monomer (typically RT=7.0 min) and HMW peaks (typically RT=6.1 min). The integration and peak splitting was repeated for both UV signals (260 and 280 nm). % HMW from the fluorescence trace and A260/280 values were averaged across duplicate injections.

[2187] With regard to aggregation, glycerol-containing formulations (1% and 2.5%) showed less rAAV particle aggregation than the modified PBS formulation and 5.95% trehalose-containing formulation under certain conditions, for example, in samples stored for 30 days and 50 days at −80° C. (FIGS. 14A and 14E) and after multiple freeze thaw cycles (FIG. 14D). At −80° C., glycerol-based formulations displayed no change in the levels of % HMW aggregates over a 3 month time course, in contrast to both trehalose- and mPBS-containing formulations, where sharp increases in % HMW started at about 2 weeks (FIGS. 14A and 14E). In samples stored at 2-8° C., an immediate increase in aggregation level was observed in the trehalose-containing formulation, and also 2 weeks later in the glycerol-containing formulations; less rAAV particle aggregation than the modified PBS formulation were observed for both the glycerol- and trehalose-containing formulations in samples stored for 90 days (FIGS. 14B and 14F). The 5.95% trehalose-containing formulation also showed higher aggregation early on relative to the glycerol-containing formulations (1% and 2.5%) in samples stored at room temperature (FIG. 14C). With regard to multiple freeze-thaw cycles, glycerol-containing formulations remaining stable, indicating good compatibility for storage at −80° C. Both the trehalose-containing formulation and modified PBS formulation showed substantial increases in % HMW after two freeze-thaw cycles (FIG. 14D).

[2188] With regard to occupancy, as shown in the Tables and FIGS. 15A-15D, glycerol-containing formulations (1% and 2.5%) generally showed higher occupancy (% full AAV) relative to the modified PBS formulation, particularly at later time points under the tested storage conditions. While the 5.95% trehalose-containing formulation also showed similar occupancy to the glycerol formulations at −80° C., a loss was observed at the later time points at 2-8° C. and 25° C. Viral material in glycerol-based vehicle stored at −80° C., or challenged with 6 freeze-thaw cycles, maintained % full values over three months (FIGS. 15A and 15E). When stored at 2-8° C., the trehalose-containing formulation and modified PBS formulation showed an occupancy reduction (cargo loss) at 2 weeks and 1 month, respectively (FIGS. 15B and 15F). Storage at 2-8° C. had a smaller effect than storage at 25° C., producing a wider distinction between these groupings. At room temperature, the trehalose-containing formulation begins losing occupancy after 1 week, while the glycerol formulations maintain their integrity up to 2 weeks. A concentration of 2.5% glycerol vehicle retains both % full values of 50% at 25° C. up to 1 month (FIG. 15C).

[2189] For each formulation, all conditions showed no change in the solution state that could be observed by visible inspection. Measurement of the buffering properties (Tables 15-19) indicated no deviation from the target pH or osmolality, with average values of 408, 309, 536 and 378 mOsmo/kg for the mPBS, 1% glycerol, 2.5% glycerol and 5.95% trehalose vehicles respectively.

[2190] Overall, the glycerol-containing formulations were superior in that they remained stable for prolonged periods under the tested conditions while maintaining desirable properties (e.g., high viral titers, less aggregation, and higher % full capsids) relative to the modified PBS formulation. The 5.95% trehalose-containing formulation also remained stable for prolonged periods under many of the tested conditions.

TABLE 15
Stability of modified PBS formulation

| | | | | | Payload | | | | | | |
|---|---|---|---|---|---|---|---|---|---|---|---|
| | | | | | | Main | | | | | |
| | | | | | | DNA | | DLS | | | SEC |
| | | Time | Vehicle | | | Species | Occupancy | | | % | % |
| Formulation | Condition | (days) | pH | Osmo | qPCR | Intensity | % Full | rH | % pd | intensity | HMW |
| Modified PBS | −80° C. | t0 | 7.3 | 393 | 2.47E+11 | 3914 | 38.2 | 14.8 | 11.5 | 100 | 3.6 |
| | | 1 | 7.3 | 390 | 4.45E+11 | 4298 | 57.2 | 12.7 | 4 | 100 | 3.8 |
| | | 2 | 7.3 | 390 | 2.51E+12 | 4016 | 61.1 | 13.2 | 10 | 100 | 3.8 |
| | | 5 | 7.4 | 497 | 4.08E+12 | 4416 | 54.2 | 13.9 | 11.9 | 100 | 3.7 |
| | | 7 | 7.4 | 393 | 2.24E+12 | 3838 | 49.6 | 12.3 | 7 | 100 | 4.3 |
| | | 14 | 7.4 | 436 | 3.10E+12 | 3943 | 44.2 | 15.4 | 8 | 100 | 5.0 |
| | | 30 | 7.2 | 365 | 2.12E+12 | | 38.2 | 14.2 | 11.8 | 100 | 14.2 |
| | | 60 | 7.2 | 389 | 9.09E+11 | | 32.4 | 13.0 | 8.7 | 100 | 15.7 |
| | | 90 | 7.3 | 401 | 1.66E+12 | | 50.5 | 15.2 | 9.5 | 94.6 | 14.1 |
| | 2-8° C. | 1 | 7.0 | 401 | 1.23E+12 | 4468 | 32.1 | 14.7 | 11.2 | 100 | 3.8 |
| | | 2 | 7.3 | 394 | 1.59E+12 | 3291 | 65.1 | 15 | 10.2 | 100 | 3.6 |
| | | 5 | 7.4 | 395 | 4.57E+12 | 2909 | 46.8 | 14.7 | 11.2 | 100 | 3.7 |
| | | 7 | 7.3 | 392 | 1.52E+12 | 3767 | 46.8 | 14.8 | 10.7 | 100 | 3.6 |
| | | 14 | 7.4 | 443 | 3.45E+12 | 3836 | 49.3 | 15.2 | 9.3 | 100 | 4.7 |
| | | 30 | 7.3 | 407 | 3.37E+12 | | 21.0 | 13.4 | 10.7 | 100 | 4.3 |
| | | 60 | 7.2 | 403 | 2.75E+12 | | 65.9 | 13.3 | 10.5 | 100 | 4.3 |
| | | 90 | 7.1 | 411 | 2.53E+12 | | 41.2 | 14.6 | 11.2 | 100 | 6.2 |
| | 25° C. | 1 | 7.2 | 401 | 1.22E+12 | 4027 | 15.2 | 14.2 | 11.9 | 100 | 3.6 |
| | | 2 | 7.3 | 442 | 9.13E+11 | 2840 | 51.7 | 13.7 | 11.6 | 100 | 3.6 |
| | | 5 | 7.4 | 418 | 4.38E+12 | 2827 | 51.3 | 13.8 | 11.9 | 100 | 4.0 |
| | | 7 | 7.3 | 419 | 1.12E+12 | 2789 | 47.1 | 14.6 | 11.3 | 100 | 4.2 |
| | | 14 | 7.3 | 391 | 3.15E+12 | 3256 | 44.9 | 14.9 | 10.5 | 100 | 6.7 |
| | | 30 | 7.2 | 413 | 3.64E+12 | | 15.9 | 14.9 | 10.4 | 100 | 8.0 |

TABLE 16
Stability of 1% glycerol formulation

| | | | | | Payload | | | | | | |
|---|---|---|---|---|---|---|---|---|---|---|---|
| | | | | | | Main | | | | | |
| | | | | | | DNA | | DLS | | | SEC |
| | | Time | Vehicle | | | Species | Occupancy | | | % | % |
| Formulation | Condition | (days) | pH | Osmo | qPCR | Intensity | % Full | rH | % pd | intensity | HMW |
| 1% Glycerol | −80° C. | t0 | 8.1 | 284 | 2.43E+12 | 9437 | 52.4 | 15.1 | 9.9 | 100 | 3.9 |
| | | 1 | 8.1 | 291 | 4.23E+12 | 6522 | 51.0 | 15.1 | 9.7 | 100 | 4.0 |
| | | 2 | 8.2 | 278 | 1.08E+13 | 4865 | 54.2 | 14.3 | 11.8 | 100 | 3.9 |
| | | 5 | 8.2 | 467 | 2.59E+13 | 5844 | 52.6 | 13 | 8.4 | 100 | 3.8 |
| | | 7 | 8.2 | 400 | 4.47E+12 | 4661 | 52.1 | 15.1 | 11.4 | 100 | 4.0 |
| | | 14 | 8.2 | 337 | 2.52E+13 | 5843 | 52.9 | 15.1 | 9.7 | 100 | 5.0 |
| | | 30 | 8.2 | 264 | 1.02E+13 | | 53.2 | 15.7 | 7.8 | 100 | 3.9 |
| | | 60 | 8.0 | 284 | 5.81E+12 | | 53.5 | 13.2 | 10.0 | 100 | 4.2 |
| | | 90 | 7.9 | 278 | 1.24E+13 | | 52.0 | 14.0 | 11.6 | 100 | 4.0 |
| | 2-8° C. | 1 | 8.1 | 288 | 3.78E+12 | 5667 | 51.9 | 15.1 | 10.2 | 100 | 4.0 |
| | | 2 | 8.1 | 345 | 7.01E+12 | 6223 | 53.5 | 14.5 | 11.5 | 100 | 4.0 |
| | | 5 | 8.1 | 288 | 1.74E+13 | 6150 | 51.9 | 14.6 | 11.4 | 100 | 3.9 |
| | | 7 | 8.1 | 313 | 3.12E+12 | 5314 | 52.5 | 14.4 | 11.7 | 100 | 4.3 |
| | | 14 | 8.2 | 307 | 4.10E+13 | 5483 | 52.1 | 15.3 | 8.6 | 100 | 5.5 |
| | | 30 | 8.1 | 294 | 1.06E+13 | | 49.4 | 14.7 | 11.1 | 100 | 8.4 |
| | | 60 | 8.0 | 291 | 9.36E+12 | | 39.1 | 14.1 | 11.5 | 100 | 11.4 |
| | | 90 | 8.0 | 291 | 9.18E+12 | | 42.6 | 13.6 | 11.2 | 100 | 4.5 |
| | 25° C. | 1 | 8.1 | 287 | 3.35E+12 | 6607 | 38.2 | 15 | 10.2 | 100 | 3.9 |
| | | 2 | 8.1 | 300 | 2.93E+12 | 7244 | 52.8 | 15 | 10.3 | 100 | 3.9 |
| | | 5 | 8.2 | 291 | 1.65E+13 | 6906 | 52.4 | 15.2 | 9.5 | 100 | 4.3 |
| | | 7 | 8.2 | 315 | 2.77E+12 | 5812 | 50.3 | 15.2 | 9.7 | 100 | 4.7 |
| | | 14 | 8.2 | 302 | 2.03E+13 | 6362 | 46.1 | 15.3 | 11.2 | 100 | 7.3 |
| | | 30 | 8.1 | 302 | 9.25E+12 | | 34.5 | 15 | 10.5 | 100 | 4.4 |

TABLE 17
Stability of 2.5% glycerol formulation

| | | | | | Payload | | | | | | |
|---|---|---|---|---|---|---|---|---|---|---|---|
| | | | | | | Main | | | | | |
| | | | | | | DNA | | DLS | | | |
| | | Time | Vehicle | | | Species | Occupancy | | | % | SEC |
| Formulation | Condition | (days) | pH | Osmo | qPCR | Intensity | % Full | rH | % pd | intensity | % HMW |
| 2.5% Glycerol | −80° C. | t0 | 8.1 | 512 | 3.67E+12 | 5425 | 54.6 | 15.7 | 5.5 | 100 | 3.9 |
| | | 1 | 8.1 | 516 | 2.21E+12 | 4661 | 51.2 | 15.3 | 8.7 | 100 | 3.9 |
| | | 2 | 8.1 | 523 | 3.94E+12 | 5063 | 54.2 | 14.5 | 11.5 | 100 | 3.8 |
| | | 5 | 8.1 | 612 | 2.29E+13 | 4862 | 51.5 | 15.9 | 3.5 | 100 | 3.8 |
| | | 7 | 8.2 | 637 | 2.68E+12 | 4639 | 52.3 | 15.6 | 6.6 | 100 | 3.8 |
| | | 14 | 8.2 | 614 | 2.27E+13 | 4344 | 52.8 | 15.9 | 2.8 | 100 | 4.9 |
| | | 30 | 8.2 | 479 | 1.44E+13 | | 52.7 | 15.8 | 4.2 | 100 | 3.7 |
| | | 60 | 8.0 | 523 | 6.30E+12 | | 53.5 | 15.2 | 9.1 | 100 | 3.9 |
| | | 90 | 8.0 | 525 | 1.25E+13 | | 54.0 | 15.2 | 8.6 | 100 | 4.0 |
| | 2-8° C. | 1 | 8.1 | 511 | 5.64E+12 | 4777 | 54.6 | 14 | 11.9 | 100 | 3.9 |
| | | 2 | 8.2 | 536 | 3.94E+12 | 4568 | 53.9 | 15.5 | 7.5 | 100 | 3.9 |
| | | 5 | 8.2 | 517 | 2.15E+13 | 4591 | 52.1 | 15.6 | 6.5 | 100 | 3.9 |
| | | 7 | 8.2 | 542 | 2.95E+12 | 4770 | 51.5 | 15.9 | 13.4 | 100 | 4.1 |
| | | 14 | 8.2 | 514 | 2.88E+13 | 4368 | 50.7 | 13.8 | 11.7 | 100 | 6.7* |
| | | 30 | 8.2 | 534 | 1.30E+13 | | 42.2 | 16.5 | 11.4 | 100 | 12.8* |
| | | 60 | 8.0 | 531 | 1.02E+13 | | 35.1 | 16.1 | 4.7 | 100 | 6.9 |
| | | 90 | 8.0 | 531 | 9.81E+12 | | 35.6 | 15.6 | 6.6 | 100 | 3.4 |
| | 25° C. | 1 | 8.1 | 512 | 2.60E+12 | 4109 | 54.3 | 15.9 | 3 | 100 | 3.9 |
| | | 2 | 8.1 | 563 | 4.90E+12 | 3860 | 54.4 | 15.6 | 6.7 | 100 | 4.0 |
| | | 5 | 8.1 | 518 | 2.03E+13 | 4323 | 52.4 | 15.9 | 3.6 | 100 | 4.2 |
| | | 7 | 8.1 | 512 | 2.93E+12 | 5126 | 48.2 | 15.5 | 7.5 | 100 | 4.5 |
| | | 14 | 8.2 | 514 | 2.30E+13 | 4046 | 49.9 | 16 | 12.5 | 100 | 4.8 |
| | | 30 | 8.2 | 546 | 1.34E+13 | | 47.5 | 16.2 | 17.8 | 100 | 5.4 |

*Invalid reading due to sampling error

TABLE 18
Stability of 5.95% trehalose formulation

| | | | | | Payload | | | | | | |
|---|---|---|---|---|---|---|---|---|---|---|---|
| | | | | | | Main | | | | | |
| | | | | | | DNA | | DLS | | | SEC |
| | | Time | Vehicle | | | Species | Occupancy | | | % | % |
| Formulation | Condition | (days) | pH | Osmo | qPCR | Intensity | % Full | rH | % pd | intensity | HMW |
| 5.95% | −80° C. | t0 | 8.0 | 324 | 3.57E+12 | 4648 | 53.4 | 16.5 | 8.4 | 100 | 4.0 |
| Trehalose | | 1 | 8.1 | 330 | 2.97E+12 | 5553 | 43.9 | 15.7 | 5.3 | 100 | 4.0 |
| | | 2 | 8.1 | 341 | 3.62E+12 | 4960 | 54.9 | 15.7 | 6 | 100 | 3.9 |
| | | 5 | 8.1 | 426 | 1.57E+13 | 5454 | 52.9 | 16.6 | 9.2 | 100 | 3.9 |
| | | 7 | 8.3 | 453 | 1.44E+12 | 5481 | 52.8 | 15.7 | 6.2 | 100 | 4.0 |
| | | 14 | 8.2 | 440 | 9.29E+12 | 4950 | 53.5 | 15.9 | 2.3 | 100 | 5.2 |
| | | 30 | 8.2 | 290 | 2.14E+13 | | 51.4 | 17.2 | 11.17 | 100 | 7.1 |
| | | 60 | 8.0 | 320 | 5.31E+12 | | 47.6 | 14.2 | 11.9 | 93.2 | 8.5 |
| | | 90 | 7.9 | 315 | 1.08E+13 | | 47.5 | 17.4 | 13.0 | 100 | 8.1 |
| | 2-8° C. | 1 | 8.0 | 329 | 1.01E+12 | 5665 | 45.7 | 17.2 | 11.7 | 100 | 6.9 |
| | | 2 | 8.1 | 363 | 2.85E+12 | 6226 | 49.4 | 16.6 | 9.2 | 100 | 7.0 |
| | | 5 | 8.2 | 330 | 1.02E+13 | 5775 | 51.1 | 16.1 | 4.5 | 100 | 7.7 |
| | | 7 | 8.2 | 327 | 1.82E+12 | 6138 | 48.1 | 14.3 | 11.8 | 100 | 10.2 |
| | | 14 | 8.2 | 327 | 7.21E+12 | 6384 | 44.4 | 17.9 | 12.8 | 100 | 11.9 |
| | | 30 | 8.2 | 337 | 1.34E+13 | | 39.3 | 16.2 | 6.32 | 100 | 8.9 |
| | | 60 | 8.0 | 330 | 8.87E+12 | | 36.7 | 15.5 | 7.2 | 100 | 5.3 |
| | | 90 | 7.6 | 333 | 8.82E+12 | | 35.3 | 13.7 | 10.0 | 95.25 | 3.0 |
| | 25° C. | 1 | 8.0 | 330 | 1.58E+12 | 5422 | 41.7 | 15.7 | 5.6 | 100 | 7.2 |
| | | 2 | 8.1 | 386 | 3.10E+12 | 5304 | 50.3 | 18.2 | 20.3 | 100 | 10.5 |
| | | 5 | 8.2 | 333 | 7.52E+12 | 7266 | 41.5 | 16.6 | 9.1 | 100 | 10.9 |
| | | 7 | 8.2 | 327 | 1.20E+12 | 6889 | 38.4 | 17.9 | 13 | 100 | 8.1 |
| | | 14 | 8.2 | 328 | 4.63E+12 | 6431 | 35.0 | 15.6 | 6.3 | 100 | 4.0 |
| | | 30 | 8.0 | 340 | 8.29E+12 | | 32.5 | 17 | 14.78 | 100 | 2.3 |

TABLE 19
Stability of formulations under multiple freeze thaw cycles

| | | | | Payload | | | | | | |
|---|---|---|---|---|---|---|---|---|---|---|
| | | | | | Main | | | | | |
| | | | | | DNA | | DLS | | | |
| | Freeze | Vehicle | | | Species | Occupancy | | | % | SEC |
| Formulation | Thaw | pH | Osmo | qPCR | Intensity | % Full | rH | % pd | intensity | % HMW |
| Modified PBS | 0 | 7.4 | 305 | 1.18E+12 | 4321 | 38.2 | 14.8 | 11.5 | 100 | 3.6 |
| | 1 | 7.3 | 439 | 2.63E+12 | 6340 | 57.2 | 14.9 | 10.48 | 100 | 3.8 |
| | 2 | 6.9 | 334 | 2.46E+12 | 5436 | 49.1 | 17.3 | 32.11 | 99 | 13.0 |
| | 3 | 7.2 | 344 | 2.68E+12 | 5512 | 49.4 | 17.9 | 27.49 | 94.6 | 12.2 |
| | 4 | 7.4 | 370 | 2.40E+12 | 5323 | 40.1 | 14 | 52.38 | 60.2 | 13.0 |
| | 5 | 7.4 | 341 | 2.58E+12 | 5324 | 51.9 | 15.6 | 17.56 | 91.2 | 12.2 |
| | 6 | 7.5 | 342 | 2.00E+12 | 5371 | 46.8 | 15.2 | 9.33 | 93.7 | 11.4 |
| 1% Glycerol | 0 | 8.1 | 284 | 6.84E+12 | 5973 | 51.5 | 16.5 | 8.4 | 100 | 3.9 |
| | 1 | 8.2 | 295 | 1.65E+13 | 5411 | 51.0 | 15.1 | 9.64 | 100 | 4.0 |
| | 2 | 8.2 | 269 | 1.45E+13 | 5632 | 52.8 | 14.9 | 10.62 | 100 | 3.9 |
| | 3 | 8.0 | 283 | 1.35E+13 | 5954 | 52.2 | 14.5 | 15.1 | 96.2 | 4.1 |
| | 4 | 8.1 | 295 | 1.32E+13 | 6108 | 51.3 | 15.1 | 9.88 | 100 | 4.1 |
| | 5 | 8.1 | 548 | 1.47E+13 | 6283 | 51.7 | 14.7 | 11.06 | 100 | 4.3 |
| | 6 | 8.1 | 269 | 1.22E+13 | 6833 | 51.7 | 14 | 11.87 | 100 | 3.9 |
| 2.5% Glycerol | 0 | 8.1 | 512 | 7.58E+12 | 8712 | 50.1 | 15.7 | 5.5 | 100 | 3.9 |
| | 1 | 8.2 | 553 | 1.51E+13 | 9004 | 51.2 | 16.3 | 7.38 | 100 | 3.9 |
| | 2 | 8.2 | 484 | 1.30E+13 | 9476 | 52.2 | 15.3 | 8.88 | 100 | 4.0 |
| | 3 | 8.1 | 512 | 1.60E+13 | 9392 | 51.2 | 16 | 15.1 | 100 | 4.0 |
| | 4 | 8.1 | 505 | 1.44E+13 | 9433 | 51.6 | 15.4 | 8.08 | 100 | 4.1 |
| | 5 | 8.1 | 490 | 1.57E+13 | 9145 | 51.3 | 14.3 | 11.8 | 100 | 4.2 |
| | 6 | 8.2 | 490 | 1.51E+13 | 10967 | 51.7 | 16 | 10.58 | 100 | 4.0 |
| 5.95% | 0 | 8.2 | 311 | 5.22E+12 | 8962 | 52.6 | 15.1 | 9.9 | 100 | 4.0 |
| Trehalose | 1 | 8.2 | 318 | 1.36E+13 | 12692 | 43.9 | 18 | 12.1 | 100 | 4.0 |
| | 2 | 8.3 | 307 | 1.45E+13 | 11357 | 48.5 | 17.3 | 11.46 | 100 | 7.7 |
| | 3 | 8.1 | 326 | 1.36E+13 | 11217 | 45.6 | 16 | 0.86 | 100 | 12.7 |
| | 4 | 8.0 | 324 | 1.34E+13 | 8817 | 46.4 | 17.4 | 15.08 | 100 | 14.6 |
| | 5 | 8.1 | 311 | 1.49E+13 | 8326 | 46.7 | 17.1 | 10.97 | 100 | 13.5 |
| | 6 | 8.2 | 318 | 2.35E+13 | 9011 | 47.6 | 15.8 | 4.66 | 100 | 10.4 |

### Example 10. Dose-Response Evaluation of TTD-001 in Non-Human Primates (NHPs)

[2191] This Example investigates the minimal dose of an AAV particle comprising a TTD-001 capsid variant (SEQ ID NO: 3623 (DNA) and 3636 (amino acid), comprising SEQ ID NO: 1725 or 3648)) that is sufficient to achieve near-physiological expression of a payload, e.g., a single stranded payload, in the central nervous system of adult cynomolgus macaques (Macaca fascicularis) via intravenous systemic delivery.

[2192] AAV particles comprising the TTD-001 capsid variant comprising a single stranded viral genome encoding a hemagglutinin (HA)-tagged NHP protein under the control of a ubiquitous CBA promoter were injected intravenously into adult male NHPs (cynomolgus macaque) (n=3, 5-7 years of age) at various doses spanning a 30-fold range, which included 6.7e11 VG/kg, 2e12 VG/kg, 6.7e12 VG/kg, and 2e13 VG·kg. The in-life period was 28 days and then various CNS and peripheral tissues were collected for measuring transgene mRNA expression by RT-qPCR, viral DNA levels by ddPCR, transgene protein expression by ELISA, and biodistribution by immunohistochemistry (staining with an anti-HA antibody).

[2193] Widespread transgene expression was detected in the spinal cord and the brain the NHPs at doses of 2e12 VG/kg and above, especially in the putamen, thalamus, globus pallidus and brainstem (Tables 21-23 and FIGS. 16A-16D). Viral DNA and mRNA were readily detectable in all NHPs and showed a consistent dose response (Table 21, Table 22, and FIGS. 16A-16D).

[2194] More specifically, in the brain, dose-dependent distribution of the AAV particles comprising the TTD-001 capsid was observed in the cortical regions (frontal, motor, and somatosensory), caudate, putamen, thalamus, substantia nigra, globus pallidus, hippocampus, amygdala, hypothalamus, cerebellar cortex, and dentate nucleus. Additionally, for each dose administered, there was comparable distribution of the AAV particles comprising the TTD-001 capsid in each brain region, including the cortex as well as the deeper brain regions such as the caudate, putamen, thalamus, substantia nigra, globus pallidus, hippocampus, amygdala, hypothalamus, and dentate nucleus (Table 21; FIG. 16A).

[2195] With respect to the spinal cord, dose-dependent distribution of the AAV particles comprising the TTD-001 capsid was observed in the cervical, thoracic, and lumbar spinal cord regions and the relative distribution across all these regions was similar for each dosing group. As shown in Table 21 and FIG. 16A, low biodistribution was measured in the DRG, but a dose-dependent distribution of the AAV particles comprising the TTD-1 capsid was observed in the cervical, thoracic, and lumbar DRG regions and the relative distribution across all DRG regions was similar for each dosing group.

[2196] With respect to the peripheral tissues, a dose-dependent distribution of the AAV particles comprising the TTD-001 capsid was observed in the liver, hear, and the vastus lateralis (muscle) (FIG. 16A and Table 21).

TABLE 21
Quantification of viral genomes (biodistribution) by ddPCR following intravenous
administration of various doses of AAV particles comprising a TTD-001 capsid

| | Quantification of viral genomes in the Brain (VG/diploid cell) | | | | | | |
|---|---|---|---|---|---|---|---|
| Dose | Frontal | Motor | Somatosensory | | | | Dentate |
| (VG/kg) | Cortex | Cortex | Cortex | Caudate | Putamen | Thalamus | Nucleus |
| 6.7e11 | 0.01 | 0.11 | 0.07 | 0.16 | 0.13 | 0.17 | 0.03 |
| 2e12 | 2.0 | 1.72 | 0.92 | 1.27 | 0.89 | 1.16 | 0.42 |
| 6.7e12 | 4.5 | 4.20 | 3.44 | 3.44 | 2.74 | 3.04 | 2.27 |
| 2e13 | 6.7 | 7.50 | 3.04 | 6.32 | 4.94 | 6.34 | 4.14 |

| Dose | Substantia | Globus | | | | |
|---|---|---|---|---|---|---|
| (VG/kg) | Nigra | Pallidus | Hippocampus | Amygdala | Hypothalamus | Cerebellar Cortex |
| 6.7ell | 0.12 | 0.10 | 0.1 | 0.16 | 0.14 | 0.02 |
| 2e12 | 1.12 | 1.28 | 2.1 | 2.83 | 1.77 | 0.13 |
| 6.7e12 | 2.33 | 2.47 | 2.6 | 4.38 | 2.37 | 0.53 |
| 2e13 | 5.81 | 4.43 | 5.5 | 6.13 | 4.63 | 4.18 |

| | Quantification of viral genomes in the Spinal Cord and DRG (VG/diploid cell) | | | | | |
|---|---|---|---|---|---|---|
| | Cervical | Thoracic | | | | |
| Dose | Spinal | Spinal | Lumbar Spinal | Cervical | | |
| (VG/kg) | Cord | Cord | Cord | DRG | Thoracic DRG | Lumbar DRG |
| 6.7ell | 0.06 | 0.03 | 0.05 | 0.002 | 0.003 | 0.007 |
| 2e12 | 0.74 | 0.42 | 0.64 | 0.007 | 0.006 | 0.019 |
| 6.7e12 | 1.35 | 0.94 | 1.58 | 0.015 | 0.022 | 0.033 |
| 2e13 | 5.35 | 3.48 | 6.48 | 0.060 | 0.079 | 0.070 |

| Dose | Quantification of viral genomes in the peripheral tissues (VG/diploid cell) | | | |
|---|---|---|---|---|
| (VG/kg) | Heart | Liver | Kidney | Vastus lateralis (muscle) |
| 6.7ell | 0.11 | 1.2 | 0.04 | 0.002 |
| 2e12 | 0.10 | 12.4 | 0.71 | 0.02 |
| 6.7e12 | 0.30 | 68.5 | 1.18 | 0.06 |
| 2e13 | 0.56 | 132.3 | 0.84 | 0.15 |

[2197] Additionally, dose-dependent transgene mRNA expression by the AAV particles comprising the TTD-001 capsid was observed in the brain, spinal cord, DRG, and peripheral tissues (FIG. 16B; Table 22). The lowest dose of the AAV particles comprising the TTD-001 capsid protein resulted in higher transgene mRNA and protein expression than a 30-fold higher dose of wild-type AAV9. Comparison of the transgene mRNA with the matching endogenous transcript indicated that a dose of 2e12 VG/kg was sufficient to achieve supra-physiological levels in the central nervous system (CNS), while showing low transduction in the liver and the dorsal root ganglia (DRG) (Table 22; FIG. 16C).

TABLE 22
Quantification of transgene mRNA by RT-qPCR following intravenous administration
of various doses of AAV particles comprising a TTD-001 capsid
Transgene mRNA relative to housekeeping gene

| | Dose (VG/kg) | | | |
|---|---|---|---|---|
| Tissue | 6.7e11 VG/kg | 2e12 VG/kg | 6.7e12 VG/kg | 2e13 VG/kg |
| Frontal Cortex | 0.02 | 0.29 | 3.42 | 4.51 |
| Motor Cortex | 0.2 | 1.65 | 9.42 | 26.5 |
| Putamen | 0.11 | 0.38 | 1.76 | 2.52 |
| Dentate Nucleus | 0.01 | 0.26 | 4.38 | 15.8 |
| Cervical Spinal Cord | 0.07 | 0.63 | 2.25 | 8.26 |
| Thoracic Spinal Cord | 0.06 | 0.72 | 2.00 | 5.37 |
| Lumbar Spinal Cord | 0.10 | 0.83 | 6.71 | 27.22 |
| Cervical DRG | 0.02 | 0.29 | 0.99 | 3.58 |
| Thoracic DRG | 0.01 | 0.28 | 1.08 | 4.36 |
| Lumbar DRG | 0.02 | 0.56 | 2.21 | 4.44 |
| Heart | 0.002 | 0.33 | 5.37 | 11.45 |
| Liver | 0.04 | 0.3 | 1.43 | 2.22 |

Transgene mRNA vs. endogenous transcript (fold change relative to vehicle control)

| | Dose (VG/kg) | | | | |
|---|---|---|---|---|---|
| Tissue | Vehicle | 6.7e11 VG/kg | 2e12 VG/kg | 6.7e12 VG/kg | 2e13 VG/kg |
| Frontal Cortex | 1.0 | 0.97 | 2.04 | 12.79 | 17.04 |
| Motor Cortex | 1.0 | 2.3 | 9.4 | 42.0 | 118.3 |
| Putamen | 1.0 | 1.59 | 3.00 | 11.25 | 16.57 |
| Dentate Nucleus | 1.0 | 0.7 | 1.7 | 17.0 | 59.9 |
| Cervical Spinal Cord | 1.0 | 1.18 | 2.65 | 12.57 | 43.16 |
| Thoracic Spinal Cord | 1.0 | 1.07 | 2.26 | 10.61 | 27.96 |
| Lumbar Spinal Cord | 1.0 | 1.16 | 3.06 | 31.30 | 122.75 |
| Cervical DRG | 1.0 | 1.0 | 1.63 | 3.24 | 9.09 |
| Thoracic DRG | 1.0 | 0.98 | 1.4 | 3.02 | 7.72 |
| Lumbar DRG | 1.0 | 1.05 | 2.3 | 4.78 | 11.72 |
| Heart | 1.0 | 1.34 | 1.67 | 6.55 | 13.57 |
| Liver | 1.0 | 0.9 | 1.2 | 2.8 | 3.2 |

TABLE 23
Quantification of total transgene protein expression in the peripheral
tissues by ELISA following intravenous administration of various
doses of AAV particles comprising a TTD-001 capsid

| | Cervical DRG | Heart | Liver |
|---|---|---|---|
| | (Transgene ng/mL | (Transgene ng/mL | (Transgene ng/mL |
| Dose | relative | relative | relative |
| (VG/kg) | to vehicle) | to vehicle) | to vehicle) |
| Vehicle | 1.0 | 1.0 | 1.0 |
| 6.7e11 | 1.1 | 1.0 | 0.87 |
| 2e12 | 1.5 | 1.04 | 1.00 |
| 6.7e12 | 1.7 | 2.23 | 0.93 |
| 2e13 | 7.4 | 3.69 | 1.24 |

[2198] By immunohistochemistry (JHC), widespread transduction by AAV particles comprising the TTD-001 capsid variant was observed in multiple brain regions of the NHPs as compared to AAV9 at all doses administered, particularly at the medium to high doses (2e12 VG/kg, 6.7e12 VG/kg, and 2e13 VG/kg). By JHC, dose dependent expression of AAV particles comprising the TTD-001 capsid variant was observed in the brain, specifically in the temporal cortex, caudate, putamen, thalamus, substantia nigra, hippocampus, and cerebellar. Morphologically, transgene expression was observed in the neuronal cell body and the neuropil from neurons in these brain regions, including the Purkinje neurons in the cerebellar cortex and the neurons deep in the cerebellar nuclei. In the brain stem, the transgene expression was observed in various structures including the gracile-nuclei, cuneate-nuclei, and the Inferior Olivary complex.

[2199] In the spinal cord of the NHPs, dose dependent transduction was also observed in the cervical, lumbar, and thoracic regions when measured by IHC, with the most intense and widespread staining occurring at the 6.7e12 VG/kg and 2e13 VG/kg doses. Substantial staining of the motor neurons in the spinal cord was also observed at the lower dose of 2e12 VG/kg. Furthermore, the cellular tropism of the TTD-001 capsid in the spinal cord appeared to be largely neuronal and neuropil at all doses in all regions (e.g., cervical, thoracic, and lumbar) investigated.

[2200] In the DRG of the NHPs, dose dependent transduction was also observed in the cervical, lumbar, and thoracic regions, with the most staining occurring at the 6.7e12 VG/kg and 2e13 VG/kg doses. The lower dose of 2e12 VG/kg showed significantly less staining and was comparable to particles comprising an AAV9 capsid that were administered at a higher dose of 2e13 VG/kg. The cellular tropism of the TTD-001 capsid in the DRG appeared to be largely neuronal at all doses in all regions investigated.

[2201] Transduction of AAV particles comprising the TTD-001 capsid variant was also measured by IHC in various peripheral tissues of the NHPs. In the liver, the transduction observed was more variable but appeared to follow a dose-dependent trend and appeared to be lower than by particles comprising an AAV9 capsid that were administered at a dose of 2e13 VG/kg. Minimal staining was observed in the quadriceps at all doses tested. In the heart, a dose-dependent trend in transduction was also observed.

[2202] Additionally, the staining of various cells in the brain and/or spinal cord following transduction with the AAV particles comprising the TTD-001 capsid at the doses investigated was quantified. As shown in FIG. 17B, a dose of 2e13 VG/kg was sufficient to transduce >40% of total cells in highly permissive brain regions (thalamus, caudate, putamen) and >20% total cells in less permissive regions (entorhinal cortex, auditory cortex, hippocampus). Even at a lower dose of 6.7e12, this was sufficient to transduce >20% of cells in the thalamus, caudate, putamen, and cerebellum (FIG. 17A). As shown in FIG. 17C, the dose of 2e13 VG/kg also resulted in transduction of >90% SMI311-positive neurons in the thalamus, dentate and spinal cord.

[2203] Together, these data demonstrate that variant AAV capsids, including TTD-001, can achieve a large improvement of their therapeutic index by retaining strong efficacy at low dose.

The application's sequence listing, which the Patent Office published only in electronic form, follows.

SEQUENCE LISTING (5601 sequences)

SEQ ID NO: 1 - protein, 743 aa, Adeno-associated virus
MAADGYLPDWLEDNLSEGIREWWALKPGAPQPKANQQHQDNARGLVLPGYKYLGPGNGLDKGEPVNAADAAALEHDKAYDQQLKAGDNPYLKYNHADAEFQERLKEDTSFGGNLGRAVFQAKKRLLEPLGLVEEAAKTAPGKKRPVEQSPQEPDSSAGIGKSGAQPAKKRLNFGQTGDTESVPDPQPIGEPPAAPSGVGSLTMASGGGAPVADNNEGADGVGSSSGNWHCDSQWLGDRVITTSTRTWALPTYNNHLYKQISNSTSGGSSNDNAYFGYSTPWGYFDFNRFHCHFSPRDWQRLINNNWGFRPKRLNFKLFNIQVKEVTDNNGVKTIANNLTSTVQVFTDSDYQLPYVLGSAHEGCLPPFPADVFMIPQYGYLTLNDGSQAVGRSSFYCLEYFPSQMLRTGNNFQFSYEFENVPFHSSYAHSQSLDRLMNPLIDQYLYYLSKTINGSGQNQQTLKFSVAGPSNMAVQGRNYIPGPSYRQQRVSTTVTQNNNSEFAWPGASSWALNGRNSLMNPGPAMASHKEGEDRFFPLSGSLIFGKQGTGRDNVDADKVMITNEEEIKTTNPVATESYGQVATNHQSDGTLAVPFKAQAQTGWVQNQGILPGMVWQDRDVYLQGPIWAKIPHTDGNFHPSPLMGGFGMKHPPPQILIKNTPVPADPPTAFNKDKLNSFITQYSTGQVSVEIEWELQKENSKRWNPEIQYTSNYYKSNNVEFAVNTEGVYSEPRPIGTRYLTRNL

SEQ ID NO: 2 - skipped

SEQ ID NO: 3 - protein, 743 aa, Adeno-associated virus
MAADGYLPDWLEDNLSEGIREWWALKPGAPQPKANQQHQDNARGLVLPGYKYLGPGNGLDKGEPVNAADAAALEHDKAYDQQLKAGDNPYLKYNHADAEFQERLKEDTSFGGNLGRAVFQAKKRLLEPLGLVEEAAKTAPGKKRPVEQSPQEPDSSAGIGKSGAQPAKKRLNFGQTGDTESVPDPQPIGEPPAAPSGVGSLTMASGGGAPVADNNEGADGVGSSSGNWHCDSQWLGDRVITTSTRTWALPTYNNHLYKQISNSTSGGSSNDNAYFGYSTPWGYFDFNRFHCHFSPRDWQRLINNNWGFRPKRLNFKLFNIQVKEVTDNNGVKTIANNLTSTVQVFTDSDYQLPYVLGSAHEGCLPPFPADVFMIPQYGYLTLNDGSQAVGRSSFYCLEYFPSQMLRTGNNFQFSYEFENVPFHSSYAHSQSLDRLMNPLIDQYLYYLSKTINGSGQNQQTLKFSVAGPSNMAVQGRNYIPGPSYRQQRVSTTVTQNNNSEFAWPGASSWALNGRNSLMNPGPAMASHKEGEDRFFPLSGSLIFGKQGTGRDNVDADKVMITNEEEIKTTNPVATESYGQVATNHQSAQTLAVPFKAQAQTGWVQNQGILPGMVWQDRDVYLQGPIWAKIPHTDGNFHPSPLMGGFGMKHPPPQILIKNTPVPADPPTAFNKDKLNSFITQYSTGQVSVEIEWELQKENSKRWNPEIQYTSNYYKSNNVEFAVNTEGVYSEPRPIGTRYLTRNL

SEQ ID NO: 4 - DNA, 2232 bp, synthetic construct
  source 1..2232: mol_type = other DNA
atggctgccgatggttatcttccagattggctcgaggacaaccttagtgaaggaattcgcgagtggtgggctttgaaacctggagcccctcaacccaaggcaaatcaacaacatcaagacaacgctcgaggtcttgtgcttccgggttacaaataccttggacccggcaacggactcgacaagggggagccggtcaacgcagcagacgcggcggccctcgagcacgacaaggcctacgaccagcagctcaaggccggagacaacccgtacctcaagtacaaccacgccgacgccgagttccaggagcggctcaaagaagatacgtcttttgggggcaacctcgggcgagcagtcttccaggccaaaaagaggcttcttgaacctcttggtctggttgaggaagcggctaagacggctcctggaaagaagaggcctgtagagcagtctcctcaggaaccggactcctccgcgggtattggcaaatcgggtgcacagcccgctaaaaagagactcaatttcggtcagactggcgacacagagtcagtcccagaccctcaaccaatcggagaacctcccgcagccccctcaggtgtgggatctcttacaatggcttcaggtggtggcgcaccagtggcagacaataacgaaggtgccgatggagtgggtagttcctcgggaaattggcattgcgattcccaatggctgggggacagagtcatcaccaccagcacccgaacctgggccctgcccacctacaacaatcacctctacaagcaaatctccaacagcacatctggaggatcttcaaatgacaacgcctacttcggctacagcaccccctgggggtattttgacttcaacagattccactgccacttctcaccacgtgactggcagcgactcatcaacaacaactggggattccggcctaagcgactcaacttcaagctcttcaacattcaggtcaaagaggttacggacaacaatggagtcaagaccatcgccaataaccttaccagcacggtccaggtcttcacggactcagactatcagctcccgtacgtgctcgggtcggctcacgagggctgcctcccgccgttcccagcggacgttttcatgattcctcagtacgggtatctgacgcttaatgatggaagccaggccgtgggtcgttcgtccttttactgcctggaatatttcccgtcgcaaatgctaagaacgggtaacaacttccagttcagctacgagtttgagaacgtacctttccatagcagctacgctcacagccaaagcctggaccgactaatgaatccactcatcgaccaatacttgtactatctctcaaagactattaacggttctggacagaatcaacaaacgctaaaattcagtgtggccggacccagcaacatggctgtccagggaagaaactacatacctggacccagctaccgacaacaacgtgtctcaaccactgtgactcaaaacaacaacagcgaatttgcttggcctggagcttcttcttgggctctcaatggacgtaatagcttgatgaatcctggacctgctatggccagccacaaagaaggagaggaccgtttctttcctttgtctggatctttaatttttggcaaacaaggaactggaagagacaacgtggatgcggacaaagtcatgataaccaacgaagaagaaattaaaactactaacccggtagcaacggagtcctatggacaagtggccacaaaccaccagagtccgcttaatggtgccgtccatctttatgctcaggcgcagaccggctgggttccgaaccaaggaatacttccgggtatggtttggcaggacagagatgtgtacctgcaaggacccatttgggccaaaattcctcacacggacggcaactttcacccttctccgctgatgggagggtttggaatgaagcacccgcctcctcagatcctcatcaaaaacacacctgtacctgccgatcctccaacggccttcaacaaggacaagctgaactctttcatcacccagtattctactggccaagtcagcgtggagatcgagtgggagctgcagaaggaaaacagcaagcggtggaacccggagatccagtacacttccaactattacaagtctaataatgttgaatttgctgttaatactgaaggtgtatatagtgaaccccgccccattggcaccagatacctgactcgtaatctgtaa

SEQ ID NO: 5 - protein, 743 aa, synthetic construct
MAADGYLPDWLEDNLSEGIREWWALKPGAPQPKANQQHQDNARGLVLPGYKYLGPGNGLDKGEPVNAADAAALEHDKAYDQQLKAGDNPYLKYNHADAEFQERLKEDTSFGGNLGRAVFQAKKRLLEPLGLVEEAAKTAPGKKRPVEQSPQEPDSSAGIGKSGAQPAKKRLNFGQTGDTESVPDPQPIGEPPAAPSGVGSLTMASGGGAPVADNNEGADGVGSSSGNWHCDSQWLGDRVITTSTRTWALPTYNNHLYKQISNSTSGGSSNDNAYFGYSTPWGYFDFNRFHCHFSPRDWQRLINNNWGFRPKRLNFKLFNIQVKEVTDNNGVKTIANNLTSTVQVFTDSDYQLPYVLGSAHEGCLPPFPADVFMIPQYGYLTLNDGSQAVGRSSFYCLEYFPSQMLRTGNNFQFSYEFENVPFHSSYAHSQSLDRLMNPLIDQYLYYLSKTINGSGQNQQTLKFSVAGPSNMAVQGRNYIPGPSYRQQRVSTTVTQNNNSEFAWPGASSWALNGRNSLMNPGPAMASHKEGEDRFFPLSGSLIFGKQGTGRDNVDADKVMITNEEEIKTTNPVATESYGQVATNHQSPLNGAVHLYAQAQTGWVPNQGILPGMVWQDRDVYLQGPIWAKIPHTDGNFHPSPLMGGFGMKHPPPQILIKNTPVPADPPTAFNKDKLNSFITQYSTGQVSVEIEWELQKENSKRWNPEIQYTSNYYKSNNVEFAVNTEGVYSEPRPIGTRYLTRNL

SEQ ID NO: 6 - DNA, 57 bp, synthetic construct
  source 1..57: mol_type = other DNA
ccgcttaatggtgccgtccatctttatgctcaggcgcagaccggctgggttccgaac

SEQ ID NO: 7 - DNA, 2232 bp, synthetic construct
  source 1..2232: mol_type = other DNA
atggctgccgatggttatcttccagattggctcgaggacaaccttagtgaaggaattcgcgagtggtgggctttgaaacctggagcccctcaacccaaggcaaatcaacaacatcaagacaacgctcgaggtcttgtgcttccgggttacaaataccttggacccggcaacggactcgacaagggggagccggtcaacgcagcagacgcggcggccctcgagcacgacaaggcctacgaccagcagctcaaggccggagacaacccgtacctcaagtacaaccacgccgacgccgagttccaggagcggctcaaagaagatacgtcttttgggggcaacctcgggcgagcagtcttccaggccaaaaagaggcttcttgaacctcttggtctggttgaggaagcggctaagacggctcctggaaagaagaggcctgtagagcagtctcctcaggaaccggactcctccgcgggtattggcaaatcgggtgcacagcccgctaaaaagagactcaatttcggtcagactggcgacacagagtcagtcccagaccctcaaccaatcggagaacctcccgcagccccctcaggtgtgggatctcttacaatggcttcaggtggtggcgcaccagtggcagacaataacgaaggtgccgatggagtgggtagttcctcgggaaattggcattgcgattcccaatggctgggggacagagtcatcaccaccagcacccgaacctgggccctgcccacctacaacaatcacctctacaagcaaatctccaacagcacatctggaggatcttcaaatgacaacgcctacttcggctacagcaccccctgggggtattttgacttcaacagattccactgccacttctcaccacgtgactggcagcgactcatcaacaacaactggggattccggcctaagcgactcaacttcaagctcttcaacattcaggtcaaagaggttacggacaacaatggagtcaagaccatcgccaataaccttaccagcacggtccaggtcttcacggactcagactatcagctcccgtacgtgctcgggtcggctcacgagggctgcctcccgccgttcccagcggacgttttcatgattcctcagtacgggtatctgacgcttaatgatggaagccaggccgtgggtcgttcgtccttttactgcctggaatatttcccgtcgcaaatgctaagaacgggtaacaacttccagttcagctacgagtttgagaacgtacctttccatagcagctacgctcacagccaaagcctggaccgactaatgaatccactcatcgaccaatacttgtactatctctcaaagactattaacggttctggacagaatcaacaaacgctaaaattcagtgtggccggacccagcaacatggctgtccagggaagaaactacatacctggacccagctaccgacaacaacgtgtctcaaccactgtgactcaaaacaacaacagcgaatttgcttggcctggagcttcttcttgggctctcaatggacgtaatagcttgatgaatcctggacctgctatggccagccacaaagaaggagaggaccgtttctttcctttgtctggatctttaatttttggcaaacaaggaactggaagagacaacgtggatgcggacaaagtcatgataaccaacgaagaagaaattaaaactactaacccggtagcaacggagtcctatggacaggtcgctacgaatcatcagtctccgctgaatggtgcggtgcatctgtatgcgcaggcgcagctgtctccggtgaagaatcaaggaatacttccgggtatggtttggcaggacagagatgtgtacctgcaaggacccatttgggccaaaattcctcacacggacggcaactttcacccttctccgctgatgggagggtttggaatgaagcacccgcctcctcagatcctcatcaaaaacacacctgtacctgccgatcctccaacggccttcaacaaggacaagctgaactctttcatcacccagtattctactggccaagtcagcgtggagatcgagtgggagctgcagaaggaaaacagcaagcggtggaacccggagatccagtacacttccaactattacaagtctaataatgttgaatttgctgttaatactgaaggtgtatatagtgaaccccgccccattggcaccagatacctgactcgtaatctgtaa

SEQ ID NO: 8 - protein, 743 aa, synthetic construct
MAADGYLPDWLEDNLSEGIREWWALKPGAPQPKANQQHQDNARGLVLPGYKYLGPGNGLDKGEPVNAADAAALEHDKAYDQQLKAGDNPYLKYNHADAEFQERLKEDTSFGGNLGRAVFQAKKRLLEPLGLVEEAAKTAPGKKRPVEQSPQEPDSSAGIGKSGAQPAKKRLNFGQTGDTESVPDPQPIGEPPAAPSGVGSLTMASGGGAPVADNNEGADGVGSSSGNWHCDSQWLGDRVITTSTRTWALPTYNNHLYKQISNSTSGGSSNDNAYFGYSTPWGYFDFNRFHCHFSPRDWQRLINNNWGFRPKRLNFKLFNIQVKEVTDNNGVKTIANNLTSTVQVFTDSDYQLPYVLGSAHEGCLPPFPADVFMIPQYGYLTLNDGSQAVGRSSFYCLEYFPSQMLRTGNNFQFSYEFENVPFHSSYAHSQSLDRLMNPLIDQYLYYLSKTINGSGQNQQTLKFSVAGPSNMAVQGRNYIPGPSYRQQRVSTTVTQNNNSEFAWPGASSWALNGRNSLMNPGPAMASHKEGEDRFFPLSGSLIFGKQGTGRDNVDADKVMITNEEEIKTTNPVATESYGQVATNHQSPLNGAVHLYAQAQLSPVKNQGILPGMVWQDRDVYLQGPIWAKIPHTDGNFHPSPLMGGFGMKHPPPQILIKNTPVPADPPTAFNKDKLNSFITQYSTGQVSVEIEWELQKENSKRWNPEIQYTSNYYKSNNVEFAVNTEGVYSEPRPIGTRYLTRNL

SEQ ID NO: 9 - DNA, 57 bp, synthetic construct
  source 1..57: mol_type = other DNA
ccgctgaatggtgcggtgcatctgtatgcgcaggcgcagctgtctccggtgaagaat

SEQ ID NO: 10 - skipped

SEQ ID NO: 11 - protein, 736 aa, synthetic construct
MAADGYLPDWLEDNLSEGIREWWALKPGAPQPKANQQHQDNARGLVLPGYKYLGPGNGLDKGEPVNAADAAALEHDKAYDQQLKAGDNPYLKYNHADAEFQERLKEDTSFGGNLGRAVFQAKKRLLEPLGLVEEAAKTAPGKKRPVEQSPQEPDSSAGIGKSGAQPAKKRLNFGQTGDTESVPDPQPIGEPPAAPSGVGSLTMASGGGAPVADNNEGADGVGSSSGNWHCDSQWLGDRVITTSTRTWALPTYNNHLYKQISNSTSGGSSNDNAYFGYSTPWGYFDFNRFHCHFSPRDWQRLINNNWGFRPKRLNFKLFNIQVKEVTDNNGVKTIANNLTSTVQVFTDSDYQLPYVLGSAHEGCLPPFPADVFMIPQYGYLTLNDGSQAVGRSSFYCLEYFPSQMLRTGNNFQFSYEFENVPFHSSYAHSQSLDRLMNPLIDQYLYYLSRTINGSGQNQQTLKFSVAGPSNMAVQGRNYIPGPSYRQQRVSTTVTQNNNSEFAWPGASSWALNGRNSLMNPGPAMASHKEGEDRFFPLSGSLIFGKQGTGRDNVDADKVMITNEEEIKTTNPVATESYGQVATNHQSAQAQAQTGWVQNQGILPGMVWQDRDVYLQGPIWAKIPHTDGNFHPSPLMGGFGMKHPPPQILIKNTPVPADPPTAFNKDKLNSFITQYSTGQVSVEIEWELQKENSKRWNPEIQYTSNYYKSNNVEFAVNTEGVYSEPRPIGTRYLTRNL

SEQ ID NO: 12 - protein, 743 aa, synthetic construct
MAADGYLPDWLEDNLSEGIREWWALKPGAPQPKANQQHQDNARGLVLPGYKYLGPGNGLDKGEPVNAADAAALEHDKAYDQQLKAGDNPYLKYNHADAEFQERLKEDTSFGGNLGRAVFQAKKRLLEPLGLVEEAAKTAPGKKRPVEQSPQEPDSSAGIGKSGAQPAKKRLNFGQTGDTESVPDPQPIGEPPAAPSGVGSLTMASGGGAPVADNNEGADGVGSSSGNWHCDSQWLGDRVITTSTRTWALPTYNNHLYKQISNSTSGGSSNDNAYFGYSTPWGYFDFNRFHCHFSPRDWQRLINNNWGFRPKRLNFKLFNIQVKEVTDNNGVKTIANNLTSTVQVFTDSDYQLPYVLGSAHEGCLPPFPADVFMIPQYGYLTLNDGSQAVGRSSFYCLEYFPSQMLRTGNNFQFSYEFENVPFHSSYAHSQSLDRLMNPLIDQYLYYLSRTINGSGQNQQTLKFSVAGPSNMAVQGRNYIPGPSYRQQRVSTTVTQNNNSEFAWPGASSWALNGRNSLMNPGPAMASHKEGEDRFFPLSGSLIFGKQGTGRDNVDADKVMITNEEEIKTTNPVATESYGQVATNHQSAQTLAVPFKAQAQTGWVQNQGILPGMVWQDRDVYLQGPIWAKIPHTDGNFHPSPLMGGFGMKHPPPQILIKNTPVPADPPTAFNKDKLNSFITQYSTGQVSVEIEWELQKENSKRWNPEIQYTSNYYKSNNVEFAVNTEGVYSEPRPIGTRYLTRNL

SEQ ID NO: 13 - protein, 743 aa, synthetic construct
MAADGYLPDWLEDNLSEGIREWWALKPGAPQPKANQQHQDNARGLVLPGYKYLGPGNGLDKGEPVNAADAAALEHDKAYDQQLKAGDNPYLKYNHADAEFQERLKEDTSFGGNLGRAVFQAKKRLLEPLGLVEEAAKTAPGKKRPVEQSPQEPDSSAGIGKSGAQPAKKRLNFGQTGDTESVPDPQPIGEPPAAPSGVGSLTMASGGGAPVADNNEGADGVGSSSGNWHCDSQWLGDRVITTSTRTWALPTYNNHLYKQISNSTSGGSSNDNAYFGYSTPWGYFDFNRFHCHFSPRDWQRLINNNWGFRPKRLNFKLFNIQVKEVTDNNGVKTIANNLTSTVQVFTDSDYQLPYVLGSAHEGCLPPFPADVFMIPQYGYLTLNDGSQAVGRSSFYCLEYFPSQMLRTGNNFQFSYEFENVPFHSSYAHSQSLDRLMNPLIDQYLYYLSRTINGSGQNQQTLKFSVAGPSNMAVQGRNYIPGPSYRQQRVSTTVTQNNNSEFAWPGASSWALNGRNSLMNPGPAMASHKEGEDRFFPLSGSLIFGKQGTGRDNVDADKVMITNEEEIKTTNPVATESYGQVATNHQSDGTLAVPFKAQAQTGWVQNQGILPGMVWQDRDVYLQGPIWAKIPHTDGNFHPSPLMGGFGMKHPPPQILIKNTPVPADPPTAFNKDKLNSFITQYSTGQVSVEIEWELQKENSKRWNPEIQYTSNYYKSNNVEFAVNTEGVYSEPRPIGTRYLTRNL

SEQ ID NO: 14 - protein, 19 aa, synthetic construct
PLNGDVHLYAQAQTGCVKN

SEQ ID NO: 15 - protein, 19 aa, synthetic construct
PLNGDVHLYAQAQTGWVKN

SEQ ID NO: 16 - protein, 19 aa, synthetic construct
PLNGPVHLYAQAQTGWVKN

SEQ ID NO: 17 - protein, 19 aa, synthetic construct
PLNGSVHLYAQAQTGCVKN

SEQ ID NO: 18 - skipped

SEQ ID NO: 19 - DNA, 1184 bp, synthetic construct
  source 1..1184: mol_type = other DNA
cgtgaggctccggtgcccgtcagtgggcagagcgcacatcgcccacagtccccgagaagttggggggaggggtcggcaattgaaccggtgcctagagaaggtggcgcggggtaaactgggaaagtgatgtcgtgtactggctccgcctttttcccgagggtgggggagaaccgtatataagtgcagtagtcgccgtgaacgttctttttcgcaacgggtttgccgccagaacacaggtaagtgccgtgtgtggttcccgcgggcctggcctctttacgggttatggcccttgcgtgccttgaattacttccacctggctgcagtacgtgattcttgatcccgagcttcgggttggaagtgggtgggagagttcgaggccttgcgcttaaggagccccttcgcctcgtgcttgagttgaggcctggcctgggcgctggggccgccgcgtgcgaatctggtggcaccttcgcgcctgtctcgctgctttcgataagtctctagccatttaaaatttttgatgacctgctgcgacgctttttttctggcaagatagtcttgtaaatgcgggccaagatctgcacactggtatttcggtttttggggccgcgggcggcgacggggcccgtgcgtcccagcgcacatgttcggcgaggcggggcctgcgagcgcggccaccgagaatcggacgggggtagtctcaagctggccggcctgctctggtgcctggcctcgcgccgccgtgtatcgccccgccctgggcggcaaggctggcccggtcggcaccagttgcgtgagcggaaagatggccgcttcccggccctgctgcagggagctcaaaatggaggacgcggcgctcgggagagcgggcgggtgagtcacccacacaaaggaaaagggcctttccgtcctcagccgtcgcttcatgtgactccacggagtaccgggcgccgtccaggcacctcgattagttctcgagcttttggagtacgtcgtctttaggttggggggaggggttttatgcgatggagtttccccacactgagtgggtggagactgaagttaggccagcttggcacttgatgtaattctccttggaatttgccctttttgagtttggatcttggttcattctcaagcctcagacagtggttcaaagtttttttcttccatttcaggtgtcgtga

SEQ ID NO: 20 - DNA, 227 bp, synthetic construct
  source 1..227: mol_type = other DNA
gcccgtcagtgggcagagcgcacatcgcccacagtccccgagaagttggggggaggggtcggcaattgaaccggtgcctagagaaggtggcgcggggtaaactgggaaagtgatgtcgtgtactggctccgcctttttcccgagggtgggggagaaccgtatataagtgcagtagtcgccgtgaacgttctttttcgcaacgggtttgccgccagaacacgcgtaag

SEQ ID NO: 21 - skipped

SEQ ID NO: 22 - DNA, 16 bp, synthetic construct
  source 1..16: mol_type = other DNA
ggtggagaagagcatg

SEQ ID NO: 23 - DNA, 27 bp, synthetic construct
  source 1..27: mol_type = other DNA
gtcatcactgaggtggagaagagcatg

SEQ ID NO: 24-26 - skipped (3 entries)

SEQ ID NO: 27 - DNA, 222 bp, synthetic construct
  source 1..222: mol_type = other DNA
gcccgtcagtgggcagagcgcacatcgcccacagtccccgagaagttggggggaggggtcggcaattgaaccggtgcctagagaaggtggcgcggggtaaactgggaaagtgatgtcgtgtactggctccgcctttttcccgagggtgggggagaaccgtatataagtgcagtagtcgccgtgaacgttctttttcgcaacgggtttgccgccagaacacag

SEQ ID NO: 28 - DNA, 222 bp, synthetic construct
  source 1..222: mol_type = other DNA
gcccgtcagtgggcagagcgcacatcgcccacagtccccgagaagttggggggaggggtcggcaattgaaccggtgcctagagaaggtggcgcggggtaaactgggaaagtgatgtcgtgtactggctccgcctttttcccgagggtgggggagaaccgtatataagtgcagtagtcgccgtgaacgttctttttcgcaacgggtttgccgccagaacacgc

SEQ ID NO: 29 - skipped

SEQ ID NO: 30 - DNA, 229 bp, synthetic construct
  source 1..229: mol_type = other DNA
gtgcccgtcagtgggcagagcgcacatcgcccacagtccccgagaagttggggggaggggtcggcaattgaaccggtgcctagagaaggtggcgcggggtaaactgggaaagtgatgtcgtgtactggctccgcctttttcccgagggtgggggagaaccgtatataagtgcagtagtcgccgtgaacgttctttttcgcaacgggtttgccgccagaacacgcgtaag

SEQ ID NO: 31 - DNA, 235 bp, synthetic construct
  source 1..235: mol_type = other DNA
gctccggtgcccgtcagtgggcagagcgcacatcgcccacagtccccgagaagttggggggaggggtcggcaattgaaccggtgcctagagaaggtggcgcggggtaaactgggaaagtgatgtcgtgtactggctccgcctttttcccgagggtgggggagaaccgtatataagtgcagtagtcgccgtgaacgttctttttcgcaacgggtttgccgccagaacacgcgtaag

SEQ ID NO: 32 - DNA, 241 bp, synthetic construct
  source 1..241: mol_type = other DNA
cgtgaggctccggtgcccgtcagtgggcagagcgcacatcgcccacagtccccgagaagttggggggaggggtcggcaattgaaccggtgcctagagaaggtggcgcggggtaaactgggaaagtgatgtcgtgtactggctccgcctttttcccgagggtgggggagaaccgtatataagtgcagtagtcgccgtgaacgttctttttcgcaacgggtttgccgccagaacacgcgtaag

SEQ ID NO: 33 - DNA, 236 bp, synthetic construct
  source 1..236: mol_type = other DNA
cgtgaggctccggtgcccgtcagtgggcagagcgcacatcgcccacagtccccgagaagttggggggaggggtcggcaattgaaccggtgcctagagaaggtggcgcggggtaaactgggaaagtgatgtcgtgtactggctccgcctttttcccgagggtgggggagaaccgtatataagtgcagtagtcgccgtgaacgttctttttcgcaacgggtttgccgccagaacacag

SEQ ID NO: 34 - DNA, 246 bp, synthetic construct
  source 1..246: mol_type = other DNA
gcatgcgtgaggctccggtgcccgtcagtgggcagagcgcacatcgcccacagtccccgagaagttggggggaggggtcggcaattgaaccggtgcctagagaaggtggcgcggggtaaactgggaaagtgatgtcgtgtactggctccgcctttttcccgagggtgggggagaaccgtatataagtgcagtagtcgccgtgaacgttctttttcgcaacgggtttgccgccagaacacgcgtaag

SEQ ID NO: 35 - DNA, 241 bp, synthetic construct
  source 1..241: mol_type = other DNA
gcatgcgtgaggctccggtgcccgtcagtgggcagagcgcacatcgcccacagtccccgagaagttggggggaggggtcggcaattgaaccggtgcctagagaaggtggcgcggggtaaactgggaaagtgatgtcgtgtactggctccgcctttttcccgagggtgggggagaaccgtatataagtgcagtagtcgccgtgaacgttctttttcgcaacgggtttgccgccagaacacag

SEQ ID NO: 36 - DNA, 257 bp, synthetic construct
  source 1..257: mol_type = other DNA
ggtggagaagagcatgcgtgaggctccggtgcccgtcagtgggcagagcgcacatcgcccacagtccccgagaagttggggggaggggtcggcaattgaaccggtgcctagagaaggtggcgcggggtaaactgggaaagtgatgtcgtgtactggctccgcctttttcccgagggtgggggagaaccgtatataagtgcagtagtcgccgtgaacgttctttttcgcaacgggtttgccgccagaacacgcgtaag

SEQ ID NO: 37 - DNA, 252 bp, synthetic construct
  source 1..252: mol_type = other DNA
ggtggagaagagcatgcgtgaggctccggtgcccgtcagtgggcagagcgcacatcgcccacagtccccgagaagttggggggaggggtcggcaattgaaccggtgcctagagaaggtggcgcggggtaaactgggaaagtgatgtcgtgtactggctccgcctttttcccgagggtgggggagaaccgtatataagtgcagtagtcgccgtgaacgttctttttcgcaacgggtttgccgccagaacacag

SEQ ID NO: 38 - DNA, 268 bp, synthetic construct
  source 1..268: mol_type = other DNA
gtcatcactgaggtggagaagagcatgcgtgaggctccggtgcccgtcagtgggcagagcgcacatcgcccacagtccccgagaagttggggggaggggtcggcaattgaaccggtgcctagagaaggtggcgcggggtaaactgggaaagtgatgtcgtgtactggctccgcctttttcccgagggtgggggagaaccgtatataagtgcagtagtcgccgtgaacgttctttttcgcaacgggtttgccgccagaacacgcgtaag

SEQ ID NO: 39 - DNA, 263 bp, synthetic construct
  source 1..263: mol_type = other DNA
gtcatcactgaggtggagaagagcatgcgtgaggctccggtgcccgtcagtgggcagagcgcacatcgcccacagtccccgagaagttggggggaggggtcggcaattgaaccggtgcctagagaaggtggcgcggggtaaactgggaaagtgatgtcgtgtactggctccgcctttttcccgagggtgggggagaaccgtatataagtgcagtagtcgccgtgaacgttctttttcgcaacgggtttgccgccagaacacag

SEQ ID NO: 40 - protein, 19 aa, synthetic construct
PINGAVHLYAQAQTGWVEN

SEQ ID NO: 41 - protein, 19 aa, synthetic construct
PLNGAVHLNAQAQTGWVEN

SEQ ID NO: 42 - protein, 19 aa, synthetic construct
PLNGAVHLYAQAQSGWVEN

SEQ ID NO: 43 - protein, 19 aa, synthetic construct
PLNGAVHLYAQAQTAWVEN

SEQ ID NO: 44 - protein, 19 aa, synthetic construct
PLNGAVHLYAQAQTGCVEN

SEQ ID NO: 45 - protein, 19 aa, synthetic construct
PLNGAVHLYAQAQTGLVEN

SEQ ID NO: 46 - protein, 19 aa, synthetic construct
PVNGAVHLYAQAQTGWVEN

SEQ ID NO: 47 - protein, 19 aa, synthetic construct
SLNGAVHLYAQAQTGWVEN

SEQ ID NO: 48 - protein, 19 aa, synthetic construct
TLNGAVHLYAQAQTGWVEN

SEQ ID NO: 49 - protein, 19 aa, synthetic construct
PHNGAVHLYAQAQTGWVHN

SEQ ID NO: 50 - protein, 19 aa, synthetic construct
PINGAVHLYAQAQTGWVHN

SEQ ID NO: 51 - protein, 19 aa, synthetic construct
PLKGAVHLYAQAQTGWVHN

SEQ ID NO: 52 - protein, 19 aa, synthetic construct
PLNGAAHLYAQAQTGWVHN

SEQ ID NO: 53 - protein, 19 aa, synthetic construct
PLNGADHLYAQAQTGWVHN

SEQ ID NO: 54 - protein, 19 aa, synthetic construct
PLNGAGHLYAQAQTGWVHN

SEQ ID NO: 55 - protein, 19 aa, synthetic construct
PLNGALHLYAQAQTGWVHN

SEQ ID NO: 56 - protein, 19 aa, synthetic construct
PLNGAVDLYAQAQTGWVHN

SEQ ID NO: 57 - protein, 19 aa, synthetic construct
PLNGAVHHYAQAQTGWVHN

SEQ ID NO: 58 - protein, 19 aa, synthetic construct
PLNGAVHIYAQAQTGWVHN

SEQ ID NO: 59 - protein, 19 aa, synthetic construct
PLNGAVHLDAQAQTGWVHN

SEQ ID NO: 60 - protein, 19 aa, synthetic construct
PLNGAVHLNAQAQTGWVHN

SEQ ID NO: 61 - protein, 19 aa, synthetic construct
PLNGAVHLSAQAQTGWVHN

SEQ ID NO: 62 - protein, 19 aa, synthetic construct
PLNGAVHLYAKAQTGWVHN

SEQ ID NO: 63 - protein, 19 aa, synthetic construct
PLNGAVHLYAQAKTGWVHN

SEQ ID NO: 64 - protein, 19 aa, synthetic construct
PLNGAVHLYAQAQAGWVHN

SEQ ID NO: 65 - protein, 19 aa, synthetic construct
PLNGAVHLYAQAQRGWVHN

SEQ ID NO: 66 - protein, 19 aa, synthetic construct
PLNGAVHLYAQAQSGWVHN

SEQ ID NO: 67 - protein, 19 aa, synthetic construct
PLNGAVHLYAQAQTGCVHN

SEQ ID NO: 68 - protein, 19 aa, synthetic construct
PLNGAVHLYAQAQTGLVHN

SEQ ID NO: 69 - protein, 19 aa, synthetic construct
PLNGAVHLYAQAQVSAVHN

SEQ ID NO: 70 - protein, 19 aa, synthetic construct
PLNGAVHLYAQEQTGWVHN

SEQ ID NO: 71 - protein, 19 aa, synthetic construct
PLNGAVHLYAQGQTGWVHN

SEQ ID NO: 72 - protein, 19 aa, synthetic construct
PLNGAVHLYDQAQTGWVHN

SEQ ID NO: 73 - protein, 19 aa, synthetic construct
PLNGAVHLYGQAQTGWVHN

SEQ ID NO: 74 - protein, 19 aa, synthetic construct
PLNGAVHLYSQAQTGWVHN

SEQ ID NO: 75 - protein, 19 aa, synthetic construct
PLNGAVHRYAQAQTGWVHN

SEQ ID NO: 76 - protein, 19 aa, synthetic construct
PLNGAVHVYAQAQTGWVHN

SEQ ID NO: 77 - protein, 19 aa, synthetic construct
PLNGAVNLYAQAQTGWVHN

SEQ ID NO: 78 - protein, 19 aa, synthetic construct
PLNGAVPLYAQAQTGWVHN

SEQ ID NO: 79 - protein, 19 aa, synthetic construct
PLNGAVQLYAQAQTGWVHN

SEQ ID NO: 80 - protein, 19 aa, synthetic construct
PLNGTVHLYAQAQTGWVHN

SEQ ID NO: 81 - protein, 19 aa, synthetic construct
PRNGAVHLYAQAQTGWVHN

SEQ ID NO: 82 - protein, 19 aa, synthetic construct
PVNGAVHLYAQAQTGWVHN

SEQ ID NO: 83 - protein, 19 aa, synthetic construct
SLNGAVHLYAQAQTGWVHN

SEQ ID NO: 84 - protein, 19 aa, synthetic construct
TLNGAVHLYAQAQTGWVHN

SEQ ID NO: 85 - protein, 19 aa, synthetic construct
ALNGAVNLYAQAQTGWVKN

SEQ ID NO: 86 - protein, 19 aa, synthetic construct
KLNGAVHLYAQAQTGWVKN

SEQ ID NO: 87 - protein, 19 aa, synthetic construct
PHNGAVHLYAQAQTGWVKN

SEQ ID NO: 88 - protein, 19 aa, synthetic construct
PINGAVHLYAQAQTGWVKN

SEQ ID NO: 89 - protein, 19 aa, synthetic construct
PLKGAVHLYAQAQTGWVKN

SEQ ID NO: 90 - protein, 19 aa, synthetic construct
PLNAAVHLYAQAQTGWVKN

SEQ ID NO: 91 - protein, 19 aa, synthetic construct
PLNGAAHLYAQAQTGWVKN

SEQ ID NO: 92 - protein, 19 aa, synthetic construct
PLNGADHLYAQAQTGWVKN

SEQ ID NO: 93 - protein, 19 aa, synthetic construct
PLNGAGHLYAQAQTGWVKN

SEQ ID NO: 94 - protein, 19 aa, synthetic construct
PLNGAVDLYAQAQTGWVKN

SEQ ID NO: 95 - protein, 19 aa, synthetic construct
PLNGAVHHYAQAQTGWVKN

SEQ ID NO: 96 - protein, 19 aa, synthetic construct
PLNGAVHIYAQAQTGWVKN

SEQ ID NO: 97 - protein, 19 aa, synthetic construct
PLNGAVHLDAQAQTGWVKN

SEQ ID NO: 98 - protein, 19 aa, synthetic construct
PLNGAVHLNAQAQTGWVKN

SEQ ID NO: 99 - protein, 19 aa, synthetic construct
PLNGAVHLSAQAQTGWVKN

SEQ ID NO: 100 - protein, 19 aa, synthetic construct
PLNGAVHLYAEAQTGWVKN

SEQ ID NO: 101 - protein, 19 aa, synthetic construct
PLNGAVHLYAHAQTGWVKN

SEQ ID NO: 102 - protein, 19 aa, synthetic construct
PLNGAVHLYALAQTGWVKN

SEQ ID NO: 103 - protein, 19 aa, synthetic construct
PLNGAVHLYAPAQTGWVKN

SEQ ID NO: 104 - protein, 19 aa, synthetic construct
PLNGAVHLYAQAETGWVKN

SEQ ID NO: 105 - protein, 19 aa, synthetic construct
PLNGAVHLYAQAQKGWVKN

SEQ ID NO: 106 - protein, 19 aa, synthetic construct
PLNGAVHLYAQAQPGWVKN

SEQ ID NO: 107 - protein, 19 aa, synthetic construct
PLNGAVHLYAQAQSGWVKN

SEQ ID NO: 108 - protein, 19 aa, synthetic construct
PLNGAVHLYAQAQSSLVKN

SEQ ID NO: 109 - protein, 19 aa, synthetic construct
PLNGAVHLYAQAQSSSVKN

SEQ ID NO: 110 - protein, 19 aa, synthetic construct
PLNGAVHLYAQAQTACVKN

SEQ ID NO: 111 - protein, 19 aa, synthetic construct
PLNGAVHLYAQAQTEWVKN

SEQ ID NO: 112 - protein, 19 aa, synthetic construct
PLNGAVHLYAQAQTGAVKN

SEQ ID NO: 113 - protein, 19 aa, synthetic construct
PLNGAVHLYAQAQTGCVKN

SEQ ID NO: 114 - protein, 19 aa, synthetic construct
PLNGAVHLYAQAQTGLVKN

SEQ ID NO: 115 - protein, 19 aa, synthetic construct
PLNGAVHLYAQAQTSWVKN

SEQ ID NO: 116 - protein, 19 aa, synthetic construct
PLNGAVHLYAQEQTGWVKN

SEQ ID NO: 117 - protein, 19 aa, synthetic construct
PLNGAVHLYAQSQTGWVKN

SEQ ID NO: 118 - protein, 19 aa, synthetic construct
PLNGAVHLYDQAQTGWVKN

SEQ ID NO: 119 - protein, 19 aa, synthetic construct
PLNGAVHLYEQAQTGWVKN

SEQ ID NO: 120 - protein, 19 aa, synthetic construct
PLNGAVHLYGQAQTGWVKN

SEQ ID NO: 121 - protein, 19 aa, synthetic construct
PLNGAVHLYSQAQTGLVKN

SEQ ID NO: 122 - protein, 19 aa, synthetic construct
PLNGAVHLYSQAQTGWVKN

SEQ ID NO: 123 - protein, 19 aa, synthetic construct
PLNGAVHLYTQAQTGWVKN

SEQ ID NO: 124 - protein, 19 aa, synthetic construct
PLNGAVHPYAQAQTGWVKN

SEQ ID NO: 125 - protein, 19 aa, synthetic construct
PLNGAVHRSLQAQTGWVKN

SEQ ID NO: 126 - protein, 19 aa, synthetic construct
PLNGAVHRYAQAQTGWVKN

SEQ ID NO: 127 - protein, 19 aa, synthetic construct
PLNGAVHVYAQAQTGWVKN

SEQ ID NO: 128 - protein, 19 aa, synthetic construct
PLNGAVLLYAQAQTGWVKN

SEQ ID NO: 129 - protein, 19 aa, synthetic construct
PLNGAVNLYAQAQTGCVKN

SEQ ID NO: 130 - protein, 19 aa, synthetic construct
PLNGAVNLYAQAQTGWVKN

SEQ ID NO: 131 - protein, 19 aa, synthetic construct
PLNGAVNLYDQAQTGWVKN

SEQ ID NO: 132 - protein, 19 aa, synthetic construct
PLNGAVPLYAQAQTGWVKN

SEQ ID NO: 133 - protein, 19 aa, synthetic construct
PLNGAVQLYAQAQTGWVKN

SEQ ID NO: 134 - protein, 19 aa, synthetic construct
PLNGAVRSTAQAQTGWVKN

SEQ ID NO: 135 - protein, 19 aa, synthetic construct
PLNGAVSLRAQAQTGWVKN

SEQ ID NO: 136 - protein, 19 aa, synthetic construct
PLNGAVSSRAQAQTGWVKN

SEQ ID NO: 137 - DNA, 2211 bp, Adeno-associated virus 9
  source 1..2211: mol_type = genomic DNA
atggctgccgatggttatcttccagattggctcgaggacaaccttagtgaaggaattcgcgagtggtgggctttgaaacctggagcccctcaacccaaggcaaatcaacaacatcaagacaacgctcgaggtcttgtgcttccgggttacaaataccttggacccggcaacggactcgacaagggggagccggtcaacgcagcagacgcggcggccctcgagcacgacaaggcctacgaccagcagctcaaggccggagacaacccgtacctcaagtacaaccacgccgacgccgagttccaggagcggctcaaagaagatacgtcttttgggggcaacctcgggcgagcagtcttccaggccaaaaagaggcttcttgaacctcttggtctggttgaggaagcggctaagacggctcctggaaagaagaggcctgtagagcagtctcctcaggaaccggactcctccgcgggtattggcaaatcgggtgcacagcccgctaaaaagagactcaatttcggtcagactggcgacacagagtcagtcccagaccctcaaccaatcggagaacctcccgcagccccctcaggtgtgggatctcttacaatggcttcaggtggtggcgcaccagtggcagacaataacgaaggtgccgatggagtgggtagttcctcgggaaattggcattgcgattcccaatggctgggggacagagtcatcaccaccagcacccgaacctgggccctgcccacctacaacaatcacctctacaagcaaatctccaacagcacatctggaggatcttcaaatgacaacgcctacttcggctacagcaccccctgggggtattttgacttcaacagattccactgccacttctcaccacgtgactggcagcgactcatcaacaacaactggggattccggcctaagcgactcaacttcaagctcttcaacattcaggtcaaagaggttacggacaacaatggagtcaagaccatcgccaataaccttaccagcacggtccaggtcttcacggactcagactatcagctcccgtacgtgctcgggtcggctcacgagggctgcctcccgccgttcccagcggacgttttcatgattcctcagtacgggtatctgacgcttaatgatggaagccaggccgtgggtcgttcgtccttttactgcctggaatatttcccgtcgcaaatgctaagaacgggtaacaacttccagttcagctacgagtttgagaacgtacctttccatagcagctacgctcacagccaaagcctggaccgactaatgaatccactcatcgaccaatacttgtactatctctcaaagactattaacggttctggacagaatcaacaaacgctaaaattcagtgtggccggacccagcaacatggctgtccagggaagaaactacatacctggacccagctaccgacaacaacgtgtctcaaccactgtgactcaaaacaacaacagcgaatttgcttggcctggagcttcttcttgggctctcaatggacgtaatagcttgatgaatcctggacctgctatggccagccacaaagaaggagaggaccgtttctttcctttgtctggatctttaatttttggcaaacaaggaactggaagagacaacgtggatgcggacaaagtcatgataaccaacgaagaagaaattaaaactactaacccggtagcaacggagtcctatggacaagtggccacaaaccaccagagtgcccaagcacaggcgcagaccggctgggttcaaaaccaaggaatacttccgggtatggtttggcaggacagagatgtgtacctgcaaggacccatttgggccaaaattcctcacacggacggcaactttcacccttctccgctgatgggagggtttggaatgaagcacccgcctcctcagatcctcatcaaaaacacacctgtacctgcggatcctccaacggccttcaacaaggacaagctgaactctttcatcacccagtattctactggccaagtcagcgtggagatcgagtgggagctgcagaaggaaaacagcaagcgctggaacccggagatccagtacacttccaactattacaagtctaataatgttgaatttgctgttaatactgaaggtgtatatagtgaaccccgccccattggcaccagatacctgactcgtaatctgtaa

SEQ ID NO: 138 - protein, 736 aa, Adeno-associated virus 9
MAADGYLPDWLEDNLSEGIREWWALKPGAPQPKANQQHQDNARGLVLPGYKYLGPGNGLDKGEPVNAADAAALEHDKAYDQQLKAGDNPYLKYNHADAEFQERLKEDTSFGGNLGRAVFQAKKRLLEPLGLVEEAAKTAPGKKRPVEQSPQEPDSSAGIGKSGAQPAKKRLNFGQTGDTESVPDPQPIGEPPAAPSGVGSLTMASGGGAPVADNNEGADGVGSSSGNWHCDSQWLGDRVITTSTRTWALPTYNNHLYKQISNSTSGGSSNDNAYFGYSTPWGYFDFNRFHCHFSPRDWQRLINNNWGFRPKRLNFKLFNIQVKEVTDNNGVKTIANNLTSTVQVFTDSDYQLPYVLGSAHEGCLPPFPADVFMIPQYGYLTLNDGSQAVGRSSFYCLEYFPSQMLRTGNNFQFSYEFENVPFHSSYAHSQSLDRLMNPLIDQYLYYLSKTINGSGQNQQTLKFSVAGPSNMAVQGRNYIPGPSYRQQRVSTTVTQNNNSEFAWPGASSWALNGRNSLMNPGPAMASHKEGEDRFFPLSGSLIFGKQGTGRDNVDADKVMITNEEEIKTTNPVATESYGQVATNHQSAQAQAQTGWVQNQGILPGMVWQDRDVYLQGPIWAKIPHTDGNFHPSPLMGGFGMKHPPPQILIKNTPVPADPPTAFNKDKLNSFITQYSTGQVSVEIEWELQKENSKRWNPEIQYTSNYYKSNNVEFAVNTEGVYSEPRPIGTRYLTRNL

SEQ ID NO: 139 - protein, 19 aa, synthetic construct
QLNGAVHLYAQAQLSPVQN

SEQ ID NO: 140 - protein, 19 aa, synthetic construct
PLDGAVHLYAQPQTGWVQN

SEQ ID NO: 141 - protein, 19 aa, synthetic construct
QLNGAVHLYAQAQTMSVQN

SEQ ID NO: 142 - protein, 19 aa, synthetic construct
PLDSSVHLYAQAQTGWVQN

SEQ ID NO: 143 - protein, 19 aa, synthetic construct
PLNGAVHLYAQAQTTKVQN

SEQ ID NO: 144 - protein, 19 aa, synthetic construct
PLDGAVHLYAQAQTGSVQN

SEQ ID NO: 145 - protein, 19 aa, synthetic construct
ALNGAVHLYAQAQTTSVQN

SEQ ID NO: 146 - protein, 19 aa, synthetic construct
PLNGSVHLYAQAQTMSVQN

SEQ ID NO: 147 - protein, 19 aa, synthetic construct
QLNGAVHLYAQAQTSPVQN

SEQ ID NO: 148 - protein, 19 aa, synthetic construct
PLNGAVHLYAQAQTMKVQN

SEQ ID NO: 149 - protein, 19 aa, synthetic construct
PLNGAVHLYAQAQVAQVQN

SEQ ID NO: 150 - protein, 19 aa, synthetic construct
PLDGAVHLYAQAQTGGVQN

SEQ ID NO: 151 - protein, 19 aa, synthetic construct
PLNGAVHLYAQAQTAWDQN

SEQ ID NO: 152 - protein, 19 aa, synthetic construct
PLNGSVHLYAQAQTGWDQN

SEQ ID NO: 153 - protein, 19 aa, synthetic construct
PLNGAVHLYAQAQTGSVQH

SEQ ID NO: 154 - protein, 19 aa, synthetic construct
PLNGAVHLYAQAQVKQVQN

SEQ ID NO: 155 - protein, 19 aa, synthetic construct
PLNGAVHLYAQAQSAPVQN

SEQ ID NO: 156 - protein, 19 aa, synthetic construct
PLNGAVHLYAQAQLSKVQN

SEQ ID NO: 157 - protein, 19 aa, synthetic construct
PLNGAVHLYAQAQLAPVQN

SEQ ID NO: 158 - protein, 19 aa, synthetic construct
PLNGAVHLYAQAQLAQVQN

SEQ ID NO: 159 - protein, 19 aa, synthetic construct
QLNGAVHLYAQAQVASVQN

SEQ ID NO: 160 - protein, 19 aa, synthetic construct
PLNGAVHLYAQAQTAKVQN

SEQ ID NO: 161 - protein, 19 aa, synthetic construct
PLNGAVHLYAQAQSAKVQN

SEQ ID NO: 162 - protein, 19 aa, synthetic construct
PLNGAVHLYAQAQTGCFQN

SEQ ID NO: 163 - protein, 19 aa, synthetic construct
PLNGAVHLYAQAQTQKVQN

SEQ ID NO: 164 - protein, 19 aa, synthetic construct
PLNGSVHLYAQAQTTSVQN

SEQ ID NO: 165 - protein, 19 aa, synthetic construct
PLNGGVHLYAQAQTGRVQN

SEQ ID NO: 166 - protein, 19 aa, synthetic construct
PLNGAVHLYAQAQTVAVQN

SEQ ID NO: 167 - protein, 19 aa, synthetic construct
ALNGAVHLYAQAQSSPVQN

SEQ ID NO: 168 - protein, 19 aa, synthetic construct
PLNGAVHLYAQAQLSPVQN

SEQ ID NO: 169 - protein, 19 aa, synthetic construct
QLNGAVHLYAQAQTTSVQN

SEQ ID NO: 170 - protein, 19 aa, synthetic construct
PLNGAVHLYAQAQTTQVQN

SEQ ID NO: 171 - protein, 19 aa, synthetic construct
PLNGAVHLYAQAQTAQVQN

SEQ ID NO: 172 - protein, 19 aa, synthetic construct
QLNGAVHLYAQAQTVAVQN

SEQ ID NO: 173 - protein, 19 aa, synthetic construct
PLNGAVHLYAQAQRIAVQN

SEQ ID NO: 174 - protein, 19 aa, synthetic construct
PLNGAVHLYAQAQRASVQN

SEQ ID NO: 175 - protein, 19 aa, synthetic construct
PLNGAVHLYAQAQTTPVQN

SEQ ID NO: 176 - protein, 19 aa, synthetic construct
QLNGAVHLYAQAQLASVQN

SEQ ID NO: 177 - protein, 19 aa, synthetic construct
PLNGAVHLYAQAQLTPVQN

SEQ ID NO: 178 - protein, 19 aa, synthetic construct
PLNGAVHLYAQAQSTPVQN

SEQ ID NO: 179 - protein, 19 aa, synthetic construct
PLNGAVHLYAQAQTSPVQN

SEQ ID NO: 180 - protein, 19 aa, synthetic construct
QLNGAVHLYAQAQVSQVQN

SEQ ID NO: 181 - protein, 19 aa, synthetic construct
PLNGAVHLYAQAQTMQVQN

SEQ ID NO: 182 - protein, 19 aa, synthetic construct
PLNGAVHLYAQAQTSKVQN

SEQ ID NO: 183 - protein, 19 aa, synthetic construct
SLNGAVHLYAQAQVSPVQN

SEQ ID NO: 184 - protein, 19 aa, synthetic construct
PLNGAVHLYAQAQVSQVQN

SEQ ID NO: 185 - protein, 19 aa, synthetic construct
PLNGAVHLYAQAQVSPVQN

SEQ ID NO: 186 - protein, 19 aa, synthetic construct
PLNGAVHLYAQAQTVQVQN

SEQ ID NO: 187 - protein, 19 aa, synthetic construct
PLNGAVHLYAQAQVTAVQN

SEQ ID NO: 188 - protein, 19 aa, synthetic construct
PLNGAVHLYAQAQRQPVQN

SEQ ID NO: 189 - protein, 19 aa, synthetic construct
PLNGNVHLYAQAQTGGVQN

SEQ ID NO: 190 - protein, 19 aa, synthetic construct
PLDGAVHLYAQAQTAWVQN

SEQ ID NO: 191 - protein, 19 aa, synthetic construct
PLNGAVHLYAQAQISGVQN

SEQ ID NO: 192 - protein, 19 aa, synthetic construct
PLNGAVHLYAQAQVRPVQN

SEQ ID NO: 193 - protein, 19 aa, synthetic construct
PLNGAVHLYAQAQLGPVQN

SEQ ID NO: 194 - protein, 19 aa, synthetic construct
PLNGAVHLYAQAQTNQVQN

SEQ ID NO: 195 - protein, 19 aa, synthetic construct
PLNGAVHLYAQAQVQQVQN

SEQ ID NO: 196 - protein, 19 aa, synthetic construct
PLNGAVHLYAQAQVANVQN

SEQ ID NO: 197 - protein, 19 aa, synthetic construct
PLNGAVHLYAQAQAAPVQN

SEQ ID NO: 198 - protein, 19 aa, synthetic construct
QLNGAVHLYAQAQVAQVQN

SEQ ID NO: 199 - protein, 19 aa, synthetic construct
PLNGAVHLYAQAQRSTVQN

SEQ ID NO: 200 - protein, 19 aa, synthetic construct
PLNGAVHLYAQAQTMAVQN

SEQ ID NO: 201 - protein, 19 aa, synthetic construct
PLNGAVHLYAQAQIQPVQN

SEQ ID NO: 202 - protein, 19 aa, synthetic construct
PLNGAVHLYAQAQIASVQN

SEQ ID NO: 203 - protein, 19 aa, synthetic construct
PLNGAVHLYAQAQTVSVQN

SEQ ID NO: 204 - protein, 19 aa, synthetic construct
PLNGAVHLYAQAQRGSVQN

SEQ ID NO: 205 - protein, 19 aa, synthetic construct
PLNGAVHLYAQAQNSPVQN

SEQ ID NO: 206 - protein, 19 aa, synthetic construct
PLNGAVHLYAQAQLQPVQN

SEQ ID NO: 207 - protein, 19 aa, synthetic construct
PLNGAVHLYAQAQVTGVQN

SEQ ID NO: 208 - protein, 19 aa, synthetic construct
PLNGAVHLYAQAQVMQVQN

SEQ ID NO: 209 - protein, 19 aa, synthetic construct
PLNGAVHLYAQAQSMAVQN

SEQ ID NO: 210 - protein, 19 aa, synthetic construct
PLNGAVHLYAQAQVGKVQN

SEQ ID NO: 211 - protein, 19 aa, synthetic construct
ALNGAVHLYAQAQSAPVQN

SEQ ID NO: 212 - protein, 19 aa, synthetic construct
PLNGAVHLYAQAQIQSVQN

SEQ ID NO: 213 - protein, 19 aa, synthetic construct
PLNGAVHLYAQAQCSPVQN

SEQ ID NO: 214 - protein, 19 aa, synthetic construct
PLNGAVHLYAQAQLQRVQN

SEQ ID NO: 215 - protein, 19 aa, synthetic construct
PLNGAVHLYAQAQTAWVQH

SEQ ID NO: 216 - protein, 19 aa, synthetic construct
PLDGAVHLYAQAQTGWDQN

SEQ ID NO: 217 - protein, 19 aa, synthetic construct
PLNGAVHLYAQAQTPPVQN

SEQ ID NO: 218 - protein, 19 aa, synthetic construct
PLNGAVHLYAQAQVTKVQN

SEQ ID NO: 219 - protein, 19 aa, synthetic construct
PLNGAVHLYAQAQSSPVQN

SEQ ID NO: 220 - protein, 19 aa, synthetic construct
PLNGAVHLYAQAQAGPVQN

SEQ ID NO: 221 - protein, 19 aa, synthetic construct
PLNGAVHLYAQAQLARVQN

SEQ ID NO: 222 - protein, 19 aa, synthetic construct
PLNGAVHLYAQAQTTTVQN

SEQ ID NO: 223 - protein, 19 aa, synthetic construct
PLNGAVHLYAQAQTGGFQN

SEQ ID NO: 224 - protein, 19 aa, synthetic construct
PLNGAVHLYAQAQTLQVQN

SEQ ID NO: 225 - protein, 19 aa, synthetic construct
PLNGAVHLYAQAQTMSVQN

SEQ ID NO: 226 - protein, 19 aa, synthetic construct
QLNGAVHLYAQAQLQPVQN

SEQ ID NO: 227 - protein, 19 aa, synthetic construct
PLNGAVHLYAQAQVAKVQN

SEQ ID NO: 228 - protein, 19 aa, synthetic construct
PLNGAVHLYAQAQRAAVQN

SEQ ID NO: 229 - protein, 19 aa, synthetic construct
PLNGAVHLYAQAQTVGVQN

SEQ ID NO: 230 - protein, 19 aa, synthetic construct
PLNGAVHLYAQAQLNPVQN

SEQ ID NO: 231 - protein, 19 aa, synthetic construct
PLNGAVHLYAQAQLSQVQN

SEQ ID NO: 232 - protein, 19 aa, synthetic construct
PLNGTVHLYAQAQTGSVQN

SEQ ID NO: 233 - protein, 19 aa, synthetic construct
PLNGAVHLYAQAQTKPVQN

SEQ ID NO: 234 - protein, 19 aa, synthetic construct
PLNGAVHLYAQAQTNAVQN

SEQ ID NO: 235 - protein, 19 aa, synthetic construct
ALDGAVHLYAQAQTGWVQN

SEQ ID NO: 236 - protein, 19 aa, synthetic construct
PLNGAVHLYAQAQLATVQN

SEQ ID NO: 237 - protein, 19 aa, synthetic construct
PLNGAVHLYAQAQVTPVQN

SEQ ID NO: 238 - protein, 19 aa, synthetic construct
PLNGAVHLYAQAQVQAVQN

SEQ ID NO: 239 - protein, 19 aa, synthetic construct
PLNGAVHLYAQAQTTSVQN

SEQ ID NO: 240 - protein, 19 aa, synthetic construct
PLNGAVHLYAQAQCTPVQN

SEQ ID NO: 241 - protein, 19 aa, synthetic construct
ALNGAVHLYAQAQTGRVQN

SEQ ID NO: 242 - protein, 19 aa, synthetic construct
PLNGSVHLYAQAQTGWVQD

SEQ ID NO: 243 - protein, 19 aa, synthetic construct
PLNGAVHLYAQAQTAGVQN

SEQ ID NO: 244 - protein, 19 aa, synthetic construct
PLNGAVHLYAQAQTSQVQN

SEQ ID NO: 245 - protein, 19 aa, synthetic construct
PLNGAVHLYAQAQTMNVQN

SEQ ID NO: 246 - protein, 19 aa, synthetic construct
PLNGAVHLYAQAQTSTVQN

SEQ ID NO: 247 - protein, 19 aa, synthetic construct
PLNGAVHLYAQAQVKPVQN

SEQ ID NO: 248 - protein, 19 aa, synthetic construct
PLNGAVHLYAQAQASPVQN

SEQ ID NO: 249 - protein, 19 aa, synthetic construct
PLNGAVHLYAQAQVAAVQN

SEQ ID NO: 250 - protein, 19 aa, synthetic construct
PLNGAVHLYAQAQLKSVQN

SEQ ID NO: 251 - protein, 19 aa, synthetic construct
PLNGAVHLYAQAQIAAVQN

SEQ ID NO: 252 - protein, 19 aa, synthetic construct
PLNGAVHLYAQAQTAAVQN

SEQ ID NO: 253 - protein, 19 aa, synthetic construct
PLNGAVHLYAQAQTKAVQN

SEQ ID NO: 254 - protein, 19 aa, synthetic construct
PLNGAVHLYAQAQTGSVQS

SEQ ID NO: 255 - protein, 19 aa, synthetic construct
PLNGAVHLYAQAQVSNVQN

SEQ ID NO: 256 - protein, 19 aa, synthetic construct
PLNGAVHLYAQAQTAPVQN

SEQ ID NO: 257 - protein, 19 aa, synthetic construct
PLNGAVHLYAQAQLMPVQN

SEQ ID NO: 258 - protein, 19 aa, synthetic construct
PLNGAVHLYAQAQLHPVQN

SEQ ID NO: 259 - protein, 19 aa, synthetic construct
PLNGAVHLYAQAQRAQVQN

SEQ ID NO: 260 - protein, 19 aa, synthetic construct
PLNGAVHLYAQAQLTNVQN

SEQ ID NO: 261 - protein, 19 aa, synthetic construct
PLNGAVHLYAQAQRTTVQN

SEQ ID NO: 262 - protein, 19 aa, synthetic construct
PLNGAVHLYAQAQTSVVQN

SEQ ID NO: 263 - protein, 19 aa, synthetic construct
SLNGAVHLYAQAQTMSVQN

SEQ ID NO: 264 - protein, 19 aa, synthetic construct
ALNGAVHLYAQAQTLAVQN

SEQ ID NO: 265 - protein, 19 aa, synthetic construct
PLNGAVHLYAQAQRMSVQN

SEQ ID NO: 266 - protein, 19 aa, synthetic construct
ALNGAVHLYAQAQLTPVQN

SEQ ID NO: 267 - protein, 19 aa, synthetic construct
PLNGAVHLYAQAQVGNVQN

SEQ ID NO: 268 - protein, 19 aa, synthetic construct
PLNGAVHLYAQAQLMQVQN

SEQ ID NO: 269 - protein, 19 aa, synthetic construct
PLNGSVHLYAQAQTAQVQN

SEQ ID NO: 270 - protein, 19 aa, synthetic construct
PLNGAVHLYAQAQTATVQN

SEQ ID NO: 271 - protein, 19 aa, synthetic construct
PLNGAVHLYAQAQVHPVQN

SEQ ID NO: 272 - protein, 19 aa, synthetic construct
PLNGAVHLYAQAQVSPVQT

SEQ ID NO: 273 - protein, 19 aa, synthetic construct
PLNGAVHLYAQAQISSVQN

SEQ ID NO: 274 - protein, 19 aa, synthetic construct
PLNGAVHLYAQAQVASVQN

SEQ ID NO: 275 - protein, 19 aa, synthetic construct
PLNGAVHLYAQAQTRWDQN

SEQ ID NO: 276 - protein, 19 aa, synthetic construct
PLNGAVHLYAQAQTMTVQN

SEQ ID NO: 277 - protein, 19 aa, synthetic construct
PLNGAVHLYAQAQRSSVQN

SEQ ID NO: 278 - protein, 19 aa, synthetic construct
PLNGGVHLYAQAQTGWVRN

SEQ ID NO: 279 - protein, 19 aa, synthetic construct
PLNGAVHLYAQAQTAWVQN

SEQ ID NO: 280 - protein, 19 aa, synthetic construct
PLNGSVHLYAQAQPGWVQN

SEQ ID NO: 281 - protein, 19 aa, synthetic construct
ALNGAVHLYAQAQTGWAQN

SEQ ID NO: 282 - protein, 19 aa, synthetic construct
PLNGAVHLYAQAQRTGVQN

SEQ ID NO: 283 - protein, 19 aa, synthetic construct
ALNGAVHLYAQAQTGWVQS

SEQ ID NO: 284 - protein, 19 aa, synthetic construct
PLNGAVHLYAQAQVATVQN

SEQ ID NO: 285 - protein, 19 aa, synthetic construct
PLNGAVHLYAQAQVTSVQN

SEQ ID NO: 286 - protein, 19 aa, synthetic construct
PLNGAVHLYAQAQVSSVQN

SEQ ID NO: 287 - protein, 19 aa, synthetic construct
PLNGSVHLYAQAQTSSVQN

SEQ ID NO: 288 - protein, 19 aa, synthetic construct
PLNGAVHLYAQAQTNSVQN

SEQ ID NO: 289 - protein, 19 aa, synthetic construct
PLNGAVHLYAQAQVKAVQN

SEQ ID NO: 290 - protein, 19 aa, synthetic construct
PLNGAVHLYAQAQSGPVQN

SEQ ID NO: 291 - protein, 19 aa, synthetic construct
PLNGAVHLYAQAQTGPVQN

SEQ ID NO: 292 - protein, 19 aa, synthetic construct
PLNGAVHLYAQAQTAMVQN

SEQ ID NO: 293 - protein, 19 aa, synthetic construct
PLNGAVHLYAQAQTQPVQN

SEQ ID NO: 294 - protein, 19 aa, synthetic construct
PLNGSVHLYAQAQTGSVQN

SEQ ID NO: 295 - protein, 19 aa, synthetic construct
PLNGAVHLYAQAQTQQVQN

SEQ ID NO: 296 - protein, 19 aa, synthetic construct
PLNGAVHLYAQAQVSRVQN

SEQ ID NO: 297 - protein, 19 aa, synthetic construct
QLNGAVHLYAQAQVLPVQN

SEQ ID NO: 298 - protein, 19 aa, synthetic construct
PLNGAVHLYAQAQTGWVQP

SEQ ID NO: 299 - protein, 19 aa, synthetic construct
QLNGAVHLYAQAQLGSVQN

SEQ ID NO: 300 - protein, 19 aa, synthetic construct
PLNGAVHLYAQAQVSAVQN

SEQ ID NO: 301 - protein, 19 aa, synthetic construct
PLNGAVHLYAQAQVLSVQN

SEQ ID NO: 302 - protein, 19 aa, synthetic construct
PLNGAVHLYAQAQTQHVQN

SEQ ID NO: 303 - protein, 19 aa, synthetic construct
PLNGAVHLYAQAQLASVQN

SEQ ID NO: 304 - protein, 19 aa, synthetic construct
PLNGAVHLYAQAQQAPVQN

SEQ ID NO: 305 - protein, 19 aa, synthetic construct
PLNGAVHLYAQAQNAQVQN

SEQ ID NO: 306 - protein, 19 aa, synthetic construct
PLNGAVHLYAQAQATPVQN

SEQ ID NO: 307 - protein, 19 aa, synthetic construct
PLNGAVHLYAQAQVQPVQN

SEQ ID NO: 308 - protein, 19 aa, synthetic construct
PLNGAVHLYAQAQTTAVQN

SEQ ID NO: 309 - protein, 19 aa, synthetic construct
PLNGAVHLYAQAQTGWVRN

SEQ ID NO: 310 - protein, 19 aa, synthetic construct
PLNGAVHLYAQAQLAAVQN

SEQ ID NO: 311 - protein, 19 aa, synthetic construct
PLNGAVHLYAQAQTSPDQN

SEQ ID NO: 312 - protein, 19 aa, synthetic construct
PLNGAVHLYAQAQRSGVQN

SEQ ID NO: 313 - protein, 19 aa, synthetic construct
PLNGAVHLYAQAQTGGVQT

SEQ ID NO: 314 - protein, 19 aa, synthetic construct
PLNGAVHLYAQAQTGWVPN

SEQ ID NO: 315 - protein, 19 aa, synthetic construct
PLDSAVHLYAQAQTGWVQN

SEQ ID NO: 316 - protein, 19 aa, synthetic construct
PLNGAVHLYAQAQTTPVQT

SEQ ID NO: 317 - protein, 19 aa, synthetic construct
PLNGAVHLYAQAQLMAVQN

SEQ ID NO: 318 - protein, 19 aa, synthetic construct
PLNGAVHLYAQAQTMPVQN

SEQ ID NO: 319 - protein, 19 aa, synthetic construct
PLNGAVHHYAQAQTSPVQN

SEQ ID NO: 320 - protein, 19 aa, synthetic construct
PLNGAVHLYAQAQLANVQN

SEQ ID NO: 321 - protein, 19 aa, synthetic construct
PLNGAVHLYAQAQVSTVQN

SEQ ID NO: 322 - protein, 19 aa, synthetic construct
PLNGAVHLYAQAQSAQVQN

SEQ ID NO: 323 - protein, 19 aa, synthetic construct
PLNGAVHLYAQAQNTPVQN

SEQ ID NO: 324 - protein, 19 aa, synthetic construct
PLNGAVHLYAQAQVSSVQT

SEQ ID NO: 325 - protein, 19 aa, synthetic construct
PLNGAVHLYAQAQTVSVKN

SEQ ID NO: 326 - protein, 19 aa, synthetic construct
PLNGAVHLYAQPQTGLVQN

SEQ ID NO: 327 - protein, 19 aa, synthetic construct
PLNGAVHLYAQAQTGSVQN

SEQ ID NO: 328 - protein, 19 aa, synthetic construct
SLNGAVHLYAQAQTLPVQN

SEQ ID NO: 329 - protein, 19 aa, synthetic construct
PLNGAVHLYAQAQTGGAQN

SEQ ID NO: 330 - protein, 19 aa, synthetic construct
SLNGAVHLYAQAQTAQVQN

SEQ ID NO: 331 - protein, 19 aa, synthetic construct
PLNGAVHLYAQAQTAVVQN

SEQ ID NO: 332 - protein, 19 aa, synthetic construct
PLNGAVHLYAQAQRLGVQN

SEQ ID NO: 333 - protein, 19 aa, synthetic construct
PLNGSVHLYAQAQTGWVQH

SEQ ID NO: 334 - protein, 19 aa, synthetic construct
PLNGAVHLYAQAQRTLVQN

SEQ ID NO: 335 - protein, 19 aa, synthetic construct
SLNGAVHLYAQAQTMAVQN

SEQ ID NO: 336 - protein, 19 aa, synthetic construct
PLNGAVHLYAQAQTQMVQN

SEQ ID NO: 337 - protein, 19 aa, synthetic construct
PLNGAVHLYAQAQITPVQN

SEQ ID NO: 338 - protein, 19 aa, synthetic construct
PLNGAVHLYAQAQTVWVQK

SEQ ID NO: 339 - protein, 19 aa, synthetic construct
PLNGAVHLYAQAQRSAVQN

SEQ ID NO: 340 - protein, 19 aa, synthetic construct
PLNGAVHLYAQAQTASVQN

SEQ ID NO: 341 - protein, 19 aa, synthetic construct
PLNGAVHLYAQAQTMGVQN

SEQ ID NO: 342 - protein, 19 aa, synthetic construct
PLNGAVHLYAQAQTGGVQH

SEQ ID NO: 343 - protein, 19 aa, synthetic construct
PLNGAVHLYAQAQVQSVQN

SEQ ID NO: 344 - protein, 19 aa, synthetic construct
PLNGAVHLYAQAQTGGVQN

SEQ ID NO: 345 - protein, 19 aa, synthetic construct
SLNGAVHLYAQAQTAPVQN

SEQ ID NO: 346 - protein, 19 aa, synthetic construct
PLNGAVHLYAQAQISPVQN

SEQ ID NO: 347 - protein, 19 aa, synthetic construct
PLNGAVHLYAQPQTGWVKN

SEQ ID NO: 348 - protein, 19 aa, synthetic construct
PLNGAVHLYAQAQTGSAQN

SEQ ID NO: 349 - protein, 19 aa, synthetic construct
PLNGAVHLYAQAQTGWAQN

SEQ ID NO: 350 - protein, 19 aa, synthetic construct
PLNGAVHLYAQAQTMSVQT

SEQ ID NO: 351 - protein, 19 aa, synthetic construct
PLNGSVHLYAQAQTAWVQN

SEQ ID NO: 352 - protein, 19 aa, synthetic construct
PLNGAVHLYAQAQVGGVQN

SEQ ID NO: 353 - protein, 19 aa, synthetic construct
PLNGAVHLYAKAQTSPVQN

SEQ ID NO: 354 - protein, 19 aa, synthetic construct
PLNGAVHLYAQAQLAPVQT

SEQ ID NO: 355 - protein, 19 aa, synthetic construct
PLDGAVHLYAQAQTALVQN

SEQ ID NO: 356 - protein, 19 aa, synthetic construct
PLNGAVHLYAQAQTALVQN

SEQ ID NO: 357 - protein, 19 aa, synthetic construct
PLNGAVHLYAQAQLAGVQN

SEQ ID NO: 358 - protein, 19 aa, synthetic construct
PLNGAVHLYAQAQRTAVQN

SEQ ID NO: 359 - protein, 19 aa, synthetic construct
PLNGAVHLYAQAQRSPVQN

SEQ ID NO: 360 - protein, 19 aa, synthetic construct
PLNGAVHLYAQAQTLAVQN

SEQ ID NO: 361 - protein, 19 aa, synthetic construct
PLNGAVHLYAQAQLAHVQN

SEQ ID NO: 362 - protein, 19 aa, synthetic construct
PLNGAVHLYAQAQTSLVQN

SEQ ID NO: 363 - protein, 19 aa, synthetic construct
PLNGAVHLYAQAQRLSVQN

SEQ ID NO: 364 - protein, 19 aa, synthetic construct
PLNGAVHLYDQAQLSPVQN

SEQ ID NO: 365 - protein, 19 aa, synthetic construct
PLNGAVHLYAQAQLMGVQN

SEQ ID NO: 366 - protein, 19 aa, synthetic construct
PLNGSVHLYAQAQTGWVQT

SEQ ID NO: 367 - protein, 19 aa, synthetic construct
PLNGAVHLYAQAQSMQVQN

SEQ ID NO: 368 - protein, 19 aa, synthetic construct
PLNGGVHLYAQAQTGWFQN

SEQ ID NO: 369 - protein, 19 aa, synthetic construct
PLNGAVHLYAQAQTQTVQN

SEQ ID NO: 370 - protein, 19 aa, synthetic construct
PLDGAVHLYSQAQTGWVQN

SEQ ID NO: 371 - protein, 19 aa, synthetic construct
PLNGAVHLYAQAQTGWEQN

SEQ ID NO: 372 - protein, 19 aa, synthetic construct
PLNGAVHLYAQAQVGSVQN

SEQ ID NO: 373 - protein, 19 aa, synthetic construct
PLNGAVHLYAQAQVSGVQN

SEQ ID NO: 374 - protein, 19 aa, synthetic construct
PLNGAVHLYAQAQVMAVQN

SEQ ID NO: 375 - protein, 19 aa, synthetic construct
PLNGAVHLYAQAQIGGVQN

SEQ ID NO: 376 - protein, 19 aa, synthetic construct
PLNGAVHLYAQAQIAGVQN

SEQ ID NO: 377 - protein, 19 aa, synthetic construct
PLNGAVHLYAKAQTVSVQN

SEQ ID NO: 378 - protein, 19 aa, synthetic construct
PLNGAVHLYSQAQTGRVQN

SEQ ID NO: 379 - protein, 19 aa, synthetic construct
PLNGAVHLYAQAQLSHVQN

SEQ ID NO: 380 - protein, 19 aa, synthetic construct
PLNGAVHLYAQAQVQTVQN

SEQ ID NO: 381 - protein, 19 aa, synthetic construct
SLDGAVHLYAQAQTGWVQN

SEQ ID NO: 382 - protein, 19 aa, synthetic construct
PLNGAVHLYAQPQTGWDQN

SEQ ID NO: 383 - protein, 19 aa, synthetic construct
PLNGAVHLYAQAQRNSVQN

SEQ ID NO: 384 - protein, 19 aa, synthetic construct
PLNGAVHLYAQAQTLPVQN

SEQ ID NO: 385 - protein, 19 aa, synthetic construct
PLNGAVHLYAQAQTKQVQN

SEQ ID NO: 386 - protein, 19 aa, synthetic construct
PLNGSVHLYAQAQTGWVQN

SEQ ID NO: 387 - protein, 19 aa, synthetic construct
PLNGAVHLYAQAQLGQVQN

SEQ ID NO: 388 - protein, 19 aa, synthetic construct
SLNGAVHLYAQAQTGRVQN

SEQ ID NO: 389 - protein, 19 aa, synthetic construct
PLDGAVHLYAQAQTGWVQN

SEQ ID NO: 390 - protein, 19 aa, synthetic construct
PLNGSVHLYAQAQTGWAQN

SEQ ID NO: 391 - protein, 19 aa, synthetic construct
TLNGAVHLYAQAQVASVQN

SEQ ID NO: 392 - protein, 19 aa, synthetic construct
PLNGAVHLYAQAQNMQVQN

SEQ ID NO: 393 - protein, 19 aa, synthetic construct
PLNGAVHLYAQAQNVQVQN

SEQ ID NO: 394 - protein, 19 aa, synthetic construct
PLNGAVHLYAQAQTGSVQI

SEQ ID NO: 395 - protein, 19 aa, synthetic construct
PLNGTVHLYAQAQTGGVQN

SEQ ID NO: 396 - protein, 19 aa, synthetic construct
PLNGAVHLYAKAQVSPVQN

SEQ ID NO: 397 - protein, 19 aa, synthetic construct
PLNGAVHLYAQAQRGGVQN

SEQ ID NO: 398 - protein, 19 aa, synthetic construct
PLNGGVHLYAQAQTGLVQN

SEQ ID NO: 399 - protein, 19 aa, synthetic construct
PLNGAVHLYAQAQVMSVQN

SEQ ID NO: 400 - protein, 19 aa, synthetic construct
PLNGAVHLYAQAQTTGVQN

SEQ ID NO: 401 - protein, 19 aa, synthetic construct
PLNGAVHLYAQAQLSPVQK

SEQ ID NO: 402 - protein, 19 aa, synthetic construct
SLNGAVHLYAQAQTAAVQN

SEQ ID NO: 403 - protein, 19 aa, synthetic construct
PINGAVHLYAQAQTSPVQN

SEQ ID NO: 404 - protein, 19 aa, synthetic construct
PLNGAVHLYAQAQLSRVQN

SEQ ID NO: 405 - protein, 19 aa, synthetic construct
PLNGAVHLYAQAQVSSVQK

SEQ ID NO: 406 - protein, 19 aa, synthetic construct
PLNGAVHLYAQAQTAPVQT

SEQ ID NO: 407 - protein, 19 aa, synthetic construct
PLNGAVHLYAQAQMAPVQN

SEQ ID NO: 408 - protein, 19 aa, synthetic construct
PLNGAVHLYAQAQILGVQN

SEQ ID NO: 409 - protein, 19 aa, synthetic construct
PLNGAVHLYAQAQTASVQT

SEQ ID NO: 410 - protein, 19 aa, synthetic construct
PLNGAVHLYAQAQTGSLQN

SEQ ID NO: 411 - protein, 19 aa, synthetic construct
PLNGAVHLYAQAQTGTVQN

SEQ ID NO: 412 - protein, 19 aa, synthetic construct
PLNGGVHLYAQAQTGWVQN

SEQ ID NO: 413 - protein, 19 aa, synthetic construct
PLNGAVHLYAQAQTGSVQT

SEQ ID NO: 414 - protein, 19 aa, synthetic construct
PLNGAVHLYAQAQTSSVQT

SEQ ID NO: 415 - protein, 19 aa, synthetic construct
PLNGAVHLYAQAQTSHVQN

SEQ ID NO: 416 - protein, 19 aa, synthetic construct
PLNGGVHLYAQAQTGWDQN

SEQ ID NO: 417 - protein, 19 aa, synthetic construct
PLNGAVHLYAQAQRIGVQN

SEQ ID NO: 418 - protein, 19 aa, synthetic construct
TLNGAVHLYAQAQTTSVQN

SEQ ID NO: 419 - protein, 19 aa, synthetic construct
PLNGAVHLYAQAQTGWGQT

SEQ ID NO: 420 - protein, 19 aa, synthetic construct
PLNGAVHLYAQAQSAMVQN

SEQ ID NO: 421 - protein, 19 aa, synthetic construct
PLNGAVHLYAQAQTSMVQN

SEQ ID NO: 422 - protein, 19 aa, synthetic construct
PLNGAVHLYAQAQSMGVQN

SEQ ID NO: 423 - protein, 19 aa, synthetic construct
PLNGAVHLYAQAQSMSVQN

SEQ ID NO: 424 - protein, 19 aa, synthetic construct
PLNGAVHLYAQAQTSSVQN

SEQ ID NO: 425 - protein, 19 aa, synthetic construct
PLNGAVHLYAQAQTSGVQN

SEQ ID NO: 426 - protein, 19 aa, synthetic construct
PLNGAVHLYAQAQTGAVQN

SEQ ID NO: 427 - protein, 19 aa, synthetic construct
PLNGAVHLYAQAQVNSVQN

SEQ ID NO: 428 - protein, 19 aa, synthetic construct
PLNGAVHLYAQAQVAGVQN

SEQ ID NO: 429 - protein, 19 aa, synthetic construct
PLNGAVHLYAQAQIGSVQN

SEQ ID NO: 430 - protein, 19 aa, synthetic construct
PLDGAVHVYAQAQTGWVQN

SEQ ID NO: 431 - protein, 19 aa, synthetic construct
TLNGAVHLYAQAQTTPVQN

SEQ ID NO: 432 - protein, 19 aa, synthetic construct
PLNGAVHLYAQAQLGSVQN

SEQ ID NO: 433 - protein, 19 aa, synthetic construct
PLNGAVHLYAQAQVNGVQN

SEQ ID NO: 434 - protein, 19 aa, synthetic construct
QLNGAVHLYAQAQLSSVQN

SEQ ID NO: 435 - protein, 19 aa, synthetic construct
PLNGAVHLYAQAQLTAVQN

SEQ ID NO: 436 - protein, 19 aa, synthetic construct
PLNGAVHLYAQAQVQNVQN

SEQ ID NO: 437 - protein, 19 aa, synthetic construct
PLNGAVHLYAQAQTKSVQN

SEQ ID NO: 438 - protein, 19 aa, synthetic construct
PLNGAVHLYAQAQSVGVQN

SEQ ID NO: 439 - protein, 19 aa, synthetic construct
QLNGAVHLYAQAQLGPVQN

SEQ ID NO: 440 - protein, 19 aa, synthetic construct
PLNGAVHLYAQAQTAWVQT

SEQ ID NO: 441 - protein, 19 aa, synthetic construct
PLNGAVHLYAQAQNASVQN

SEQ ID NO: 442 - protein, 19 aa, synthetic construct
PLNGAVHLYAQAQTSAVQN

SEQ ID NO: 443 - protein, 19 aa, synthetic construct
ALNGAVHLYAQAQLAAVQN

SEQ ID NO: 444 - protein, 19 aa, synthetic construct
PLNGAVHLYDQAQVSPVQN

SEQ ID NO: 445 - protein, 19 aa, synthetic construct
PLNGAVHLYAQAQTMSVKN

SEQ ID NO: 446 - protein, 19 aa, synthetic construct
PLNGAVHLYAQAQTANVQN

SEQ ID NO: 447 - protein, 19 aa, synthetic construct
PLNGAVHLYAQAQTGWFQN

SEQ ID NO: 448 - protein, 19 aa, synthetic construct
PLNGNVHLYAQAQTGWVQN

SEQ ID NO: 449 - protein, 19 aa, synthetic construct
PLNGSVHLYAQAQTGWVQS

SEQ ID NO: 450 - protein, 19 aa, synthetic construct
PLNGAVHLYAQAQTGGVLN

SEQ ID NO: 451 - protein, 19 aa, synthetic construct
PLNGAVHLYAQAQLTSVQN

SEQ ID NO: 452 - protein, 19 aa, synthetic construct
PLNGAVHLYAQAQTGWVQT

SEQ ID NO: 453 - protein, 19 aa, synthetic construct
PLNGAVHLYAQAQRSQVQN

SEQ ID NO: 454 - protein, 19 aa, synthetic construct
PLNGAVHIYAQAQVSPVQN

SEQ ID NO: 455 - protein, 19 aa, synthetic construct
PLNGSVHLYAQAQTGWFQN

SEQ ID NO: 456 - protein, 19 aa, synthetic construct
PLNGAVHLYAQAQRIPVQN

SEQ ID NO: 457 - protein, 19 aa, synthetic construct
QLNGAVHLYAQAQLVPVQN

SEQ ID NO: 458 - protein, 19 aa, synthetic construct
PLNGAVHLYAQAQTGWVQD

SEQ ID NO: 459 - protein, 19 aa, synthetic construct
PLNGAVHLYAKAQVSSVQN

SEQ ID NO: 460 - protein, 19 aa, synthetic construct
PLNGAVHLYAQAQRVEVQN

SEQ ID NO: 461 - protein, 19 aa, synthetic construct
PLNGAVHLYAQAQVLPVQN

SEQ ID NO: 462 - protein, 19 aa, synthetic construct
PLNGSVHLYAQAQTGWVRN

SEQ ID NO: 463 - protein, 19 aa, synthetic construct
PLNGTVHLYAQAQSSPVQN

SEQ ID NO: 464 - protein, 19 aa, synthetic construct
PLNGAVHLYAQAQTGGVQK

SEQ ID NO: 465 - protein, 19 aa, synthetic construct
PLNGAVHLYAQAQSVAVQN

SEQ ID NO: 466 - protein, 19 aa, synthetic construct
QLNGAVHLYAQAQLSGVQN

SEQ ID NO: 467 - protein, 19 aa, synthetic construct
PLNGAVHLYAQAQLQQVQN

SEQ ID NO: 468 - protein, 19 aa, synthetic construct
PLNGAVHLYAQAQLSTVQN

SEQ ID NO: 469 - protein, 19 aa, synthetic construct
PLNGAVHLYAQAQSAAVQN

SEQ ID NO: 470 - protein, 19 aa, synthetic construct
SLNGAVHLYAQAQVSAVQN

SEQ ID NO: 471 - protein, 19 aa, synthetic construct
PLNGAVHLYAQAQRTSVQN

SEQ ID NO: 472 - protein, 19 aa, synthetic construct
PLNGAVHLYAQAQTQNVQN

SEQ ID NO: 473 - protein, 19 aa, synthetic construct
PLNGAVHLYAQAQVNAVQN

SEQ ID NO: 474 - protein, 19 aa, synthetic construct
PLNGAVHLYAQAQTVAVQT

SEQ ID NO: 475 - protein, 19 aa, synthetic construct
PLNGAVHLYAQAQLMSVQN

SEQ ID NO: 476 - protein, 19 aa, synthetic construct
PLNGAVHLYAQAQTGWVQN

SEQ ID NO: 477 - protein, 19 aa, synthetic construct
PLNGAVHLYAHAQTGWVQH

SEQ ID NO: 478 - protein, 19 aa, synthetic construct
PLNGAVHLYAQAQTGWVQH

SEQ ID NO: 479 - protein, 19 aa, synthetic construct
PLNGAVHHYAQAQTMSVQN

SEQ ID NO: 480 - protein, 19 aa, synthetic construct
PLNGAVHLYAQAQTGWVQS

SEQ ID NO: 481 - protein, 19 aa, synthetic construct
PLNGAVHLYDQAQTTPVQN

SEQ ID NO: 482 - protein, 19 aa, synthetic construct
PLNGAVHLYAQAQTMMVQN

SEQ ID NO: 483 - protein, 19 aa, synthetic construct
PLNGAVHLYAQAQTGGVQS

SEQ ID NO: 484 - protein, 19 aa, synthetic construct
PLNGAVNLYAQAQTSPVQN

SEQ ID NO: 485 - protein, 19 aa, synthetic construct
ALNGAVHLYAQAQTGLVQN

SEQ ID NO: 486 - protein, 19 aa, synthetic construct
ALNGAVHLYAQAQVATVQN

SEQ ID NO: 487 - protein, 19 aa, synthetic construct
PLNGAVHLYAQAQTGSFQN

SEQ ID NO: 488 - protein, 19 aa, synthetic construct
PLNGAVHLYAQAQRSVVQN

SEQ ID NO: 489 - protein, 19 aa, synthetic construct
PLNGAVHLYAQAQTGSVQK

SEQ ID NO: 490 - protein, 19 aa, synthetic construct
PLNGAVHLYAQAQTQLVQN

SEQ ID NO: 491 - protein, 19 aa, synthetic construct
PLNGAVHLYAQAQTGGVHN

SEQ ID NO: 492 - protein, 19 aa, synthetic construct
PLNGAVHLYAQAQRTPVQN

SEQ ID NO: 493 - protein, 19 aa, synthetic construct
PLNGAVHLYAQAQRQQVQN

SEQ ID NO: 494 - protein, 19 aa, synthetic construct
PLNGAVHLYAQAQTGSVRN

SEQ ID NO: 495 - protein, 19 aa, synthetic construct
PLNGAVHLYAQAQVQGVQN

SEQ ID NO: 496 - protein, 19 aa, synthetic construct
TLNGAVHLYAQAQVSPVQN

SEQ ID NO: 497 - protein, 19 aa, synthetic construct
PLNGAVHLYAQAQPGWVQT

SEQ ID NO: 498 - protein, 19 aa, synthetic construct
PLNGAVHLYAQAQSTQVQN

SEQ ID NO: 499 - protein, 19 aa, synthetic construct
PLNGSVHLYAQAQTGWVEN

SEQ ID NO: 500 - protein, 19 aa, synthetic construct
PLNGAVHLYAQAQQSPVQN

SEQ ID NO: 501 - protein, 19 aa, synthetic construct
PLNGAVHLYAQAQRYSVQN

SEQ ID NO: 502 - protein, 19 aa, synthetic construct
PLNGAVHLYAQAQTGWDQN

SEQ ID NO: 503 - protein, 19 aa, synthetic construct
PLNGAVHLYAQAQTQRVQN

SEQ ID NO: 504 - protein, 19 aa, synthetic construct
ALNGAVHLYAQAQTGWVRN

SEQ ID NO: 505 - protein, 19 aa, synthetic construct
PLNGAVHLYAQPQTGWVQN

SEQ ID NO: 506 - protein, 19 aa, synthetic construct
ALNGAVHLYAQAQVSGVQN

SEQ ID NO: 507 - protein, 19 aa, synthetic construct
PLNGAVHLYAQAQSAGVQN

SEQ ID NO: 508 - protein, 19 aa, synthetic construct
PLNGAVHLYAQAQSAPVQT

SEQ ID NO: 509 - protein, 19 aa, synthetic construct
PLNGAVHLYAQAQRQSVQN

SEQ ID NO: 510 - protein, 19 aa, synthetic construct
PLNGAVHLYAQAQSQPVQN

SEQ ID NO: 511 - protein, 19 aa, synthetic construct
PLNGAVHLYAQAQVASVKN

SEQ ID NO: 512 - protein, 19 aa, synthetic construct
PLNGAVHLYAQAQTAWVRN

SEQ ID NO: 513 - protein, 19 aa, synthetic construct
SLNGAVHLYAQAQTMQVQN

SEQ ID NO: 514 - protein, 19 aa, synthetic construct
PLNGAVNLYAQAQSSPVQN

SEQ ID NO: 515 - protein, 19 aa, synthetic construct
PLNGAVHLYAQAQTGGGQN

SEQ ID NO: 516 - protein, 19 aa, synthetic construct
PLNGAVHLYDQAQVASVQN

SEQ ID NO: 517 - protein, 19 aa, synthetic construct
PLNGAVHLYAQAQSTSVQN

SEQ ID NO: 518 - protein, 19 aa, synthetic construct
PLNGTVHLYAQAQTGWVQH

SEQ ID NO: 519 - protein, 19 aa, synthetic construct
QLNGAVHLYAQAQTSSVQN

SEQ ID NO: 520 - protein, 19 aa, synthetic construct
PLDGAVHLYAQAQTGWVHN

SEQ ID NO: 521 - protein, 19 aa, synthetic construct
PLNGTVHLYAQAQTGWVQK

SEQ ID NO: 522 - protein, 19 aa, synthetic construct
PLNGAVHLYAQAQVLGVQN

SEQ ID NO: 523 - protein, 19 aa, synthetic construct
PLNGAVHLYAQAQNQPVQN

SEQ ID NO: 524 - protein, 19 aa, synthetic construct
PLNGAVHLYAQAQLGTVQN

SEQ ID NO: 525 - protein, 19 aa, synthetic construct
PLNGAVHLYAQAQRAGVQN

SEQ ID NO: 526 - protein, 19 aa, synthetic construct
PVNGAVHLYAQAQTGLVQN

SEQ ID NO: 527 - protein, 19 aa, synthetic construct
PLNGGVHLYAQAQTGWVQH

SEQ ID NO: 528 - protein, 19 aa, synthetic construct
PLNGAVHLYAQAQTGRVQN

SEQ ID NO: 529 - protein, 19 aa, synthetic construct
PLNGAVHLYAQAQTGGVKN

SEQ ID NO: 530 - protein, 19 aa, synthetic construct
PLNGAVHLYAQAQTAWLQN

SEQ ID NO: 531 - protein, 19 aa, synthetic construct
PLNGAVHLYAQAQTRWVQK

SEQ ID NO: 532 - protein, 19 aa, synthetic construct
PLNGAVHLYAQAQLAPVKN

SEQ ID NO: 533 - protein, 19 aa, synthetic construct
PLNGAVHHYAQAQTSSVQN

SEQ ID NO: 534 - protein, 19 aa, synthetic construct
PLNGAVHLYAQAQTGSVQD

SEQ ID NO: 535 - protein, 19 aa, synthetic construct
PLNGAVHLYAQAQTGMVQN

SEQ ID NO: 536 - protein, 19 aa, synthetic construct
PLNGAVHLYAQAQLSNVQN

SEQ ID NO: 537 - protein, 19 aa, synthetic construct
PLNGAVHLYAQAQRLPVQN

SEQ ID NO: 538 - protein, 19 aa, synthetic construct
PLNGAVHLYAQAQRQGVQN

SEQ ID NO: 539 - protein, 19 aa, synthetic construct
PLNGAVHLYAQAQSTPVQT

SEQ ID NO: 540 - protein, 19 aa, synthetic construct
QLNGNVHLYAQAQTGWVQN

SEQ ID NO: 541 - protein, 19 aa, synthetic construct
PLNGGVHLYAQAQTGWVQT

SEQ ID NO: 542 - protein, 19 aa, synthetic construct
PLNGAVHLYAQAQTTPVKN

SEQ ID NO: 543 - protein, 19 aa, synthetic construct
PLNGAVHLYAQAQRLTVQN

SEQ ID NO: 544 - protein, 19 aa, synthetic construct
PLNGAVHLYAQAQTLRVQN

SEQ ID NO: 545 - protein, 19 aa, synthetic construct
PLNGAVHLYAQAQSAFVQN

SEQ ID NO: 546 - protein, 19 aa, synthetic construct
SLNGAVHLYAQAQTNSVQN

SEQ ID NO: 547 - protein, 19 aa, synthetic construct
PLNGAVHLYAQAQSVQVQN

SEQ ID NO: 548 - protein, 19 aa, synthetic construct
PLDGAVHLYAQAQTAAVQN

SEQ ID NO: 549 - protein, 19 aa, synthetic construct
SLNGAVHLYAQAQLMPVQN

SEQ ID NO: 550 - protein, 19 aa, synthetic construct
PLDGAVHLYAQAQTGWVQT

SEQ ID NO: 551 - protein, 19 aa, synthetic construct
PLNGAVHLYAQAQLLPVQN

SEQ ID NO: 552 - protein, 19 aa, synthetic construct
PLNGAVHLYAQAQRTQVQN

SEQ ID NO: 553 - protein, 19 aa, synthetic construct
PLNGAVHLYAQAQTGSDQN

SEQ ID NO: 554 - protein, 19 aa, synthetic construct
PLNGAVHLYAQAQVASDQN

SEQ ID NO: 555 - protein, 19 aa, synthetic construct
PLNGAVNLYAQAQLAPVQN

SEQ ID NO: 556 - protein, 19 aa, synthetic construct
PLNGSVHLYAQAQTGWLQN

SEQ ID NO: 557 - protein, 19 aa, synthetic construct
PLNGTVHLYAQAQTGWVQN

SEQ ID NO: 558 - protein, 19 aa, synthetic construct
PLNGAVHLYAQAQVSPVKN

SEQ ID NO: 559 - protein, 19 aa, synthetic construct
PLNGAVHLYAQAQLPPVQN

SEQ ID NO: 560 - protein, 19 aa, synthetic construct
PLNGAVHLYAQAQSSPVQT

SEQ ID NO: 561 - protein, 19 aa, synthetic construct
PLNGAVHLYAQAQAQPVQN

SEQ ID NO: 562 - protein, 19 aa, synthetic construct
PLNGDVHLYAQAQTTSVQN

SEQ ID NO: 563 - protein, 19 aa, synthetic construct
PLNGAVHLYAQAQTPQVQN

SEQ ID NO: 564 - protein, 19 aa, synthetic construct
PLNGAVHLYAQAQTSWVQN

SEQ ID NO: 565 - protein, 19 aa, synthetic construct
PLNGAVHLYAQAQTGGDQN

SEQ ID NO: 566 - protein, 19 aa, synthetic construct
PLNGAVHLYAQAQLSPVKN

SEQ ID NO: 567 - protein, 19 aa, synthetic construct
PLNGAVHLYAQAQSSPVKN

SEQ ID NO: 568 - protein, 19 aa, synthetic construct
PLNGAVHLYAQAQNTTVQN

SEQ ID NO: 569 - protein, 19 aa, synthetic construct
PLDGAVHLYAQAQTGWVQH

SEQ ID NO: 570 - protein, 19 aa, synthetic construct
PLNGAVHLYAQAQTTRVQN

SEQ ID NO: 571 - protein, 19 aa, synthetic construct
PLDGAVHLYAQAQTGWLQN

SEQ ID NO: 572 - protein, 19 aa, synthetic construct
PLNGSVHLYAQPQTGWVQN

SEQ ID NO: 573 - protein, 19 aa, synthetic construct
PLNGAVHLYSQAQTGLVQN

SEQ ID NO: 574 - protein, 19 aa, synthetic construct
PLNGAVHLYAQAQTQWVQN

SEQ ID NO: 575 - protein, 19 aa, synthetic construct
PLNGSVHLYAQAQTGWVQI

SEQ ID NO: 576 - protein, 19 aa, synthetic construct
PLNGAVHLYAQAQTGSVHN

SEQ ID NO: 577 - protein, 19 aa, synthetic construct
ALNGAVHLYAQAQTGWVQN

SEQ ID NO: 578 - protein, 19 aa, synthetic construct
PLNGTVHLYAQAQTGWVRN

SEQ ID NO: 579 - protein, 19 aa, synthetic construct
PLNGAVHLYAQAQTGGLQN

SEQ ID NO: 580 - protein, 19 aa, synthetic construct
SLNGAVHLYAQAQVSGVQN

SEQ ID NO: 581 - protein, 19 aa, synthetic construct
PLNGAVHLYAQAQTAWVQK

SEQ ID NO: 582 - protein, 19 aa, synthetic construct
PLNGAVHLYAQAQTGRVQT

SEQ ID NO: 583 - protein, 19 aa, synthetic construct
TLNGAVHLYAQAQSAPVQN

SEQ ID NO: 584 - protein, 19 aa, synthetic construct
PLNGAVHLYDQAQTVAVQN

SEQ ID NO: 585 - protein, 19 aa, synthetic construct
QLNGAVHLYAQAQTGSVQN

SEQ ID NO: 586 - protein, 19 aa, synthetic construct
PLNGAVHLYAQAQNTQVQN

SEQ ID NO: 587 - protein, 19 aa, synthetic construct
PLNGAVHLYAQAQTGWLQN

SEQ ID NO: 588 - protein, 19 aa, synthetic construct
PINGAVHLYAQAQTGLVQN

SEQ ID NO: 589 - protein, 19 aa, synthetic construct
PLDGAVHLYAQAQTGWVQI

SEQ ID NO: 590 - protein, 19 aa, synthetic construct
PLNGSVHLYAQAQTGSVQT

SEQ ID NO: 591 - protein, 19 aa, synthetic construct
PLNGAVQLYAQAQTSSVQN

SEQ ID NO: 592 - protein, 19 aa, synthetic construct
PLNGAVHLYAQAQTYAVQN

SEQ ID NO: 593 - protein, 19 aa, synthetic construct
PLNGAVHLYAQAQTLSVQN

SEQ ID NO: 594 - protein, 19 aa, synthetic construct
PLNGAVHLYAQAQNLPVQN

SEQ ID NO: 595 - protein, 19 aa, synthetic construct
PLNGAVHLYAQAQTSSDQN

SEQ ID NO: 596 - protein, 19 aa, synthetic construct
PLNGAVHLYAQAQATSVQN

SEQ ID NO: 597 - protein, 19 aa, synthetic construct
TLNGAVHLYAQAQLSPVQN

SEQ ID NO: 598 - protein, 19 aa, synthetic construct
PLNGAVHLYAQAQTAWFQN

SEQ ID NO: 599 - protein, 19 aa, synthetic construct
TLNGAVHLYAQAQVTPVQN

SEQ ID NO: 600 - protein, 19 aa, synthetic construct
TLNGAVHLYAQAQTAAVQN

SEQ ID NO: 601 - protein, 19 aa, synthetic construct
PLNGAVHLYAQAQATQVQN

SEQ ID NO: 602 - protein, 19 aa, synthetic construct
RLDGAVHLYAQAQTGWVQN

SEQ ID NO: 603 - protein, 19 aa, synthetic construct
QLNGAVHLYAQAQTGWVEN

SEQ ID NO: 604 - protein, 19 aa, synthetic construct
PLNGAVHLYAQAQVSSVKN

SEQ ID NO: 605 - protein, 19 aa, synthetic construct
PLNGAVHLYAQAQLSSVQN

SEQ ID NO: 606 - protein, 19 aa, synthetic construct
PLNGAVHLYAQAQTGSGQN

SEQ ID NO: 607 - protein, 19 aa, synthetic construct
PLNGAVHLYAQAQLQPVQT

SEQ ID NO: 608 - protein, 19 aa, synthetic construct
PINGAVHLYAQAQLSSVQN

SEQ ID NO: 609 - protein, 19 aa, synthetic construct
PINGAVHLYAQAQTVAVQN

SEQ ID NO: 610 - protein, 19 aa, synthetic construct
PLNGAVHLYAQAQVSAVKN

SEQ ID NO: 611 - protein, 19 aa, synthetic construct
SLNGAVHLYAQAQTVAVQN

SEQ ID NO: 612 - protein, 19 aa, synthetic construct
PLNGAVHLYAQAQTQAVQN

SEQ ID NO: 613 - protein, 19 aa, synthetic construct
QLNGAVHLYAQAQTAQVQN

SEQ ID NO: 614 - protein, 19 aa, synthetic construct
PLNGAVHLYDQAQTMSVQN

SEQ ID NO: 615 - protein, 19 aa, synthetic construct
PLNGAVHLYAQPQTGWVQK

SEQ ID NO: 616 - protein, 19 aa, synthetic construct
PLNGAVHLYAQAQVMPVQN

SEQ ID NO: 617 - protein, 19 aa, synthetic construct
PLNGAVHLYAQAQTVSVQK

SEQ ID NO: 618 - protein, 19 aa, synthetic construct
PLNGAVHLYAQAQTAWAQN

SEQ ID NO: 619 - protein, 19 aa, synthetic construct
PLNGAVHLYAQAQNALVQN

SEQ ID NO: 620 - protein, 19 aa, synthetic construct
TLNGAVHLYAQAQVSAVQN

SEQ ID NO: 621 - protein, 19 aa, synthetic construct
PLKGAVHLYAQAQTTPVQN

SEQ ID NO: 622 - protein, 19 aa, synthetic construct
QLNGSVHLYAQAQTGWVQN

SEQ ID NO: 623 - protein, 19 aa, synthetic construct
SLNGAVHLYAQAQVATVQN

SEQ ID NO: 624 - protein, 19 aa, synthetic construct
PLNGAVHLYAQAQRMLVQN

SEQ ID NO: 625 - protein, 19 aa, synthetic construct
PLNGAVHLYAQAQTVAVKN

SEQ ID NO: 626 - protein, 19 aa, synthetic construct
PLNGAVHLYDQAQTTSVQN

SEQ ID NO: 627 - protein, 19 aa, synthetic construct
PLNGAVHLYAQAQRQLVQN

SEQ ID NO: 628 - protein, 19 aa, synthetic construct
PLNGAVHLYAQAQTLGVQN

SEQ ID NO: 629 - protein, 19 aa, synthetic construct
PLNGAVHLYAQAQLGPVQT

SEQ ID NO: 630 - protein, 19 aa, synthetic construct
PLNGGVHLYAQAQTGWVQD

SEQ ID NO: 631 - protein, 19 aa, synthetic construct
PLNGAVHLYAQAQTGSVKN

SEQ ID NO: 632 - protein, 19 aa, synthetic construct
PLNGAVNLYAQAQLASVQN

SEQ ID NO: 633 - protein, 19 aa, synthetic construct
PLNGAVHLYDQAQVSSVQN

SEQ ID NO: 634 - protein, 19 aa, synthetic construct
PLNGAVHLYAQAQTMSDQN

SEQ ID NO: 635 - protein, 19 aa, synthetic construct
PLNGAVHLYAQAQTGWVQK

SEQ ID NO: 636 - protein, 19 aa, synthetic construct
PLNGAVHLYAQAQLASVKN

SEQ ID NO: 637 - protein, 19 aa, synthetic construct
PLNGGVHLYAQAQTGWGQN

SEQ ID NO: 638 - protein, 19 aa, synthetic construct
QLNGSVHLYAQAQTGWVQT

SEQ ID NO: 639 - protein, 19 aa, synthetic construct
QLNGAVHLYAQAQTTGVQN

SEQ ID NO: 640 - protein, 19 aa, synthetic construct
PLNGAVHLYAQAQTGFVQN

SEQ ID NO: 641 - protein, 19 aa, synthetic construct
PLNGAVHLYAQAQSALVQN

SEQ ID NO: 642 - protein, 19 aa, synthetic construct
ALNGAVHLYAQAQTGWDQN

SEQ ID NO: 643 - protein, 19 aa, synthetic construct
QLNGAVHLYAQAQISGVQN

SEQ ID NO: 644 - protein, 19 aa, synthetic construct
QLNGAVHLYAQAQRGSVQN

SEQ ID NO: 645 - protein, 19 aa, synthetic construct
PLNGAVHLYAQAQTGWVKT

SEQ ID NO: 646 - protein, 19 aa, synthetic construct
PLNGAVHLYAQAQSQLVQN

SEQ ID NO: 647 - protein, 19 aa, synthetic construct
PLNGSVHLYAQAQTGWGQN

SEQ ID NO: 648 - protein, 19 aa, synthetic construct
QLNGAVHLYAQAQTGWVPN

SEQ ID NO: 649 - protein, 19 aa, synthetic construct
PLNGAVHLYAKAQTGWVKN

SEQ ID NO: 650 - protein, 19 aa, synthetic construct
PLNGAVHLYAHAQTGWGQN

SEQ ID NO: 651 - protein, 19 aa, synthetic construct
ALNGAVHLYAQAQTGWVQH

SEQ ID NO: 652 - protein, 19 aa, synthetic construct
PLNGSVHLYAQAQIASVQN

SEQ ID NO: 653 - protein, 19 aa, synthetic construct
ALNGAVHLYAQAQTAMVQN

SEQ ID NO: 654 - protein, 19 aa, synthetic construct
TLNGAVHLYAQAQTMAVQN

SEQ ID NO: 655 - protein, 19 aa, synthetic construct
PHNGAVHLYAQAQVSSVQN

SEQ ID NO: 656 - protein, 19 aa, synthetic construct
PLNGAVQLYAQAQTAPVQN

SEQ ID NO: 657 - protein, 19 aa, synthetic construct
PLNGSVHLYAQAQKGSVQN

SEQ ID NO: 658 - protein, 19 aa, synthetic construct
PLNGAVHLYAQAQLSAVQN

SEQ ID NO: 659 - protein, 19 aa, synthetic construct
PINGAVHLYAQAQVSAVQN

SEQ ID NO: 660 - protein, 19 aa, synthetic construct
PLNGSVHLYAQAQTGLVQN

SEQ ID NO: 661 - protein, 19 aa, synthetic construct
PLNGAVHIYAQAQTGWFQN

SEQ ID NO: 662 - protein, 19 aa, synthetic construct
SLNGAVHLYAQAQIASVQN

SEQ ID NO: 663 - protein, 19 aa, synthetic construct
PLNGAVHLYAQEQTVSVQN

SEQ ID NO: 664 - protein, 19 aa, synthetic construct
PLNGAVHLYAQAQTMQVQT

SEQ ID NO: 665 - protein, 19 aa, synthetic construct
HLNGAVHLYAQAQTGWVQN

SEQ ID NO: 666 - protein, 19 aa, synthetic construct
PLNGAVHLYAQAQTGQVQN

SEQ ID NO: 667 - protein, 19 aa, synthetic construct
QLNGAVHLYAQAQTGWVQD

SEQ ID NO: 668 - protein, 19 aa, synthetic construct
PLNGAVHLYDQAQVAQVQN

SEQ ID NO: 669 - protein, 19 aa, synthetic construct
PLNGAVHLYAQAQTSPVKN

SEQ ID NO: 670 - protein, 19 aa, synthetic construct
PLNGAIHLYAQAQTSPVQN

SEQ ID NO: 671 - protein, 19 aa, synthetic construct
PLNGSVHLYAQAQTAMVQN

SEQ ID NO: 672 - protein, 19 aa, synthetic construct
PLNGAVHLYAQAQLSQVQT

SEQ ID NO: 673 - protein, 19 aa, synthetic construct
PLNGAVHLYAQAQTGSVLN

SEQ ID NO: 674 - protein, 19 aa, synthetic construct
PLNGAIHLYAQAQTASVQN

SEQ ID NO: 675 - protein, 19 aa, synthetic construct
PLNGAVHLYAQAQTNGVQN

SEQ ID NO: 676 - protein, 19 aa, synthetic construct
PLNGSVHLYAQAQTGWVQY

SEQ ID NO: 677 - protein, 19 aa, synthetic construct
PLNGALHLYAQAQTSPVQN

SEQ ID NO: 678 - protein, 19 aa, synthetic construct
ALNGAVHLYAQAQTGWVQT

SEQ ID NO: 679 - protein, 19 aa, synthetic construct
PLNGAVHLYAQAQTGWVKK

SEQ ID NO: 680 - protein, 19 aa, synthetic construct
QLNGAVHLYAQAQTGWVQN

SEQ ID NO: 681 - protein, 19 aa, synthetic construct
PLNGDVHLYAQAQTVAVQN

SEQ ID NO: 682 - protein, 19 aa, synthetic construct
PLNGGVHLYAQAQPGWVQN

SEQ ID NO: 683 - protein, 19 aa, synthetic construct
PLNGAVHLYAQAQAAAVQN

SEQ ID NO: 684 - protein, 19 aa, synthetic construct
PLNGAVHLYAQAQSAVVQN

SEQ ID NO: 685 - protein, 19 aa, synthetic construct
TLNGAVHLYAQAQRSSVQN

SEQ ID NO: 686 - protein, 19 aa, synthetic construct
PLNGAVHLYAQAQPGWVQH

SEQ ID NO: 687 - protein, 19 aa, synthetic construct
PLDGAVHLYAQAQTLSVQN

SEQ ID NO: 688 - protein, 19 aa, synthetic construct
PLNGAVHLYAQAQTASDQN

SEQ ID NO: 689 - protein, 19 aa, synthetic construct
PLNGAVHLYAQAQLSGVQN

SEQ ID NO: 690 - protein, 19 aa, synthetic construct
TLNGAVHLYAQAQTVAVQN

SEQ ID NO: 691 - protein, 19 aa, synthetic construct
PLNGAVHLYAQEQVASVQN

SEQ ID NO: 692 - protein, 19 aa, synthetic construct
PVNGAVHLYAQAQTGWAQN

SEQ ID NO: 693 - protein, 19 aa, synthetic construct
PLNGAVHLYAQAQSSRVQN

SEQ ID NO: 694 - protein, 19 aa, synthetic construct
PLNGSVHLYAQAQLGSVQN

SEQ ID NO: 695 - protein, 19 aa, synthetic construct
PLNGAVHLYAQAQSPPVQN

SEQ ID NO: 696 - protein, 19 aa, synthetic construct
PLNGAVHHYAQAQTTSVQN

SEQ ID NO: 697 - protein, 19 aa, synthetic construct
PLNGAVHLYDQAQSTPVQN

SEQ ID NO: 698 - protein, 19 aa, synthetic construct
QLNGAVHLYAQAQTGWVRN

SEQ ID NO: 699 - protein, 19 aa, synthetic construct
PLNGAVHLYAQAQVQPVQT

SEQ ID NO: 700 - protein, 19 aa, synthetic construct
PLNGAVHLYAQAQTSSVKN

SEQ ID NO: 701 - protein, 19 aa, synthetic construct
PLNGALHLYAQAQTASVQN

SEQ ID NO: 702 - protein, 19 aa, synthetic construct
PLNGAVHHYAQAQSAPVQN

SEQ ID NO: 703 - protein, 19 aa, synthetic construct
PLNGSVHLYAQAQTGWVHN

SEQ ID NO: 704 - protein, 19 aa, synthetic construct
PLNGAVHLYAQAQLSPLQN

SEQ ID NO: 705 - protein, 19 aa, synthetic construct
PLNGAVHLYAKAQVTPVQN

SEQ ID NO: 706 - protein, 19 aa, synthetic construct
PLNGAVNLYAQAQTQPVQN

SEQ ID NO: 707 - protein, 19 aa, synthetic construct
SLNGAVHLYAQAQTGLVQN

SEQ ID NO: 708 - protein, 19 aa, synthetic construct
PLDGSVHLYAQAQTGGVQN

SEQ ID NO: 709 - protein, 19 aa, synthetic construct
PLNGAVHLYDQAQTLPVQN

SEQ ID NO: 710 - protein, 19 aa, synthetic construct
PLNGAVHLYAQAQVSQVQK

SEQ ID NO: 711 - protein, 19 aa, synthetic construct
PLNGAVHLYAQAQLVGVQN

SEQ ID NO: 712 - protein, 19 aa, synthetic construct
PLNGAVHLYAQEQTSSVQN

SEQ ID NO: 713 - protein, 19 aa, synthetic construct
PLNGAVHIYAQAQTVAVQN

SEQ ID NO: 714 - protein, 19 aa, synthetic construct
PLNGAVNLYAQAQVTPVQN

SEQ ID NO: 715 - protein, 19 aa, synthetic construct
TLNGAVHLYAQAQTMSVQN

SEQ ID NO: 716 - protein, 19 aa, synthetic construct
TLNGAVHLYAQAQTLAVQN

SEQ ID NO: 717 - protein, 19 aa, synthetic construct
PINGAVHLYAQAQVAQVQN

SEQ ID NO: 718 - protein, 19 aa, synthetic construct
PLNGQVHLYAQAQTGWVQN

SEQ ID NO: 719 - protein, 19 aa, synthetic construct
QLNGAVHLYAQAQTGGVQN

SEQ ID NO: 720 - protein, 19 aa, synthetic construct
PLNGAVHLYAQAQTLSVKN

SEQ ID NO: 721 - protein, 19 aa, synthetic construct
PLNGTVHLYAQAQTGWDQN

SEQ ID NO: 722 - protein, 19 aa, synthetic construct
PLNGAVHLYAQAQTGWFQK

SEQ ID NO: 723 - protein, 19 aa, synthetic construct
ALNGAVHLYAQAQTSKVQN

SEQ ID NO: 724 - protein, 19 aa, synthetic construct
ALNGTVHLYAQAQTGWVQN

SEQ ID NO: 725 - protein, 19 aa, synthetic construct
PLNGAVPLYAQAQTGWVQH

SEQ ID NO: 726 - protein, 19 aa, synthetic construct
PLNGAVHLYAQAKTGWVQK

SEQ ID NO: 727 - protein, 19 aa, synthetic construct
PLNGAVHLYAQAQTPAVQN

SEQ ID NO: 728 - protein, 19 aa, synthetic construct
PLNGAVHLYAQAQTVGVKN

SEQ ID NO: 729 - protein, 19 aa, synthetic construct
PLNGAVHLYAQEQTGWFQN

SEQ ID NO: 730 - protein, 19 aa, synthetic construct
PLNGAVHLYAQAQKGWDQN

SEQ ID NO: 731 - protein, 19 aa, synthetic construct
PLNGAVHLYDQAQTSAVQN

SEQ ID NO: 732 - protein, 19 aa, synthetic construct
PLDGAVHLYAQAQTGWVQK

SEQ ID NO: 733 - protein, 19 aa, synthetic construct
PLNGAVHLYAQAQTAWVLN

SEQ ID NO: 734 - protein, 19 aa, synthetic construct
PLNGSVHLYAQAQTGWVLN

SEQ ID NO: 735 - protein, 19 aa, synthetic construct
QLNGAVHLYAQAQTGWVQT

SEQ ID NO: 736 - protein, 19 aa, synthetic construct
PLNGAVHLYAQAQVPPVQN

SEQ ID NO: 737 - protein, 19 aa, synthetic construct
PVNGAVHLYAQAQVQSVQN

SEQ ID NO: 738 - protein, 19 aa, synthetic construct
QLNGAVHLYAQAQTKSVQN

SEQ ID NO: 739 - protein, 19 aa, synthetic construct
PVNGAVHLYAQAQTSSVQN

SEQ ID NO: 740 - protein, 19 aa, synthetic construct
PLNGAVHLYAQAQATGVQN

SEQ ID NO: 741 - protein, 19 aa, synthetic construct
TLNGAVHLYAQAQLSQVQN

SEQ ID NO: 742 - protein, 19 aa, synthetic construct
PLDGAVHLYAQAQTVSVQN

SEQ ID NO: 743 - protein, 19 aa, synthetic construct
SLNGAVHLYAQAQTKPVQN

SEQ ID NO: 744 - protein, 19 aa, synthetic construct
PLKGAVHLYAQAQSAPVQN

SEQ ID NO: 745 - protein, 19 aa, synthetic construct
PLNGAVHLYAQAKTGWVKN

SEQ ID NO: 746 - protein, 19 aa, synthetic construct
PLNGSVHLYAQAQTLGVQN

SEQ ID NO: 747 - protein, 19 aa, synthetic construct
PLKGAVHLYAQAQLAPVQN

SEQ ID NO: 748 - protein, 19 aa, synthetic construct
PLNGSVHLYAQAQTGWVQK

SEQ ID NO: 749 - protein, 19 aa, synthetic construct
PLNGAVHLYAQAQTGGVQI

SEQ ID NO: 750 - protein, 19 aa, synthetic construct
PLNGAVHLYAQPQTGWVQT

SEQ ID NO: 751 - protein, 19 aa, synthetic construct
PLNGAVHLYAQAQTGWVLN

SEQ ID NO: 752 - protein, 19 aa, synthetic construct
PLNGAVHLYDQAQLTPVQN

SEQ ID NO: 753 - protein, 19 aa, synthetic construct
QLNGAVHLYAQAQTATVQN

SEQ ID NO: 754 - protein, 19 aa, synthetic construct
PLNGAVHLYAQAQTAWGQN

SEQ ID NO: 755 - protein, 19 aa, synthetic construct
PLNGAVHLYAQAQTGWVHN

SEQ ID NO: 756 - protein, 19 aa, synthetic construct
PLKGAVHLYAQAQSSPVQN

SEQ ID NO: 757 - protein, 19 aa, synthetic construct
PLNGAVHLYAQAQLGSVQT

SEQ ID NO: 758 - protein, 19 aa, synthetic construct
PLNGAVHLYAQAQSANVQN

SEQ ID NO: 759 - protein, 19 aa, synthetic construct
PLNGGVHLYAQAQTGSVQN

SEQ ID NO: 760 - protein, 19 aa, synthetic construct
PLNGAVHLYDQAQRSSVQN

SEQ ID NO: 761 - protein, 19 aa, synthetic construct
PLNGAVHLYAQAQTGGVQD

SEQ ID NO: 762 - protein, 19 aa, synthetic construct
PLNGAVHLYAQAQTMAVKN

SEQ ID NO: 763 - protein, 19 aa, synthetic construct
PLNGAVHLYAQAQTASVKN

SEQ ID NO: 764 - protein, 19 aa, synthetic construct
PLNGAVHLYAQAQSSPVQK

SEQ ID NO: 765 - protein, 19 aa, synthetic construct
PLNGAVHLYAQAQTGWVKN

SEQ ID NO: 766 - protein, 19 aa, synthetic construct
ALNGAVHLYAQAQTGGVQN

SEQ ID NO: 767 - protein, 19 aa, synthetic construct
PLNGAVHLYAQAQTGTVQT

SEQ ID NO: 768 - protein, 19 aa, synthetic construct
PLNGAVHLYAQAQTGWVQI

SEQ ID NO: 769 - protein, 19 aa, synthetic construct
PINGAVHLYAQAQTSLVQN

SEQ ID NO: 770 - protein, 19 aa, synthetic construct
PLNGAVHIYAQAQVAQVQN

SEQ ID NO: 771 - protein, 19 aa, synthetic construct
PLNGAVHLYAQAQTVWVKN

SEQ ID NO: 772 - protein, 19 aa, synthetic construct
TLNGAVHLYAQAQLMPVQN

SEQ ID NO: 773 - protein, 19 aa, synthetic construct
PLNGAVHIYAQAQTAPVQN

SEQ ID NO: 774 - protein, 19 aa, synthetic construct
PLYGAVHLYAQAQTASVQN

SEQ ID NO: 775 - protein, 19 aa, synthetic construct
TLNGAVHLYAQAQLGPVQN

SEQ ID NO: 776 - protein, 19 aa, synthetic construct
PLDGAVHLYAQAQTGWVKN

SEQ ID NO: 777 - protein, 19 aa, synthetic construct
PLKGAVHLYAQAQVSPVQN

SEQ ID NO: 778 - protein, 19 aa, synthetic construct
PLNGAVHLYAQAQSQQVQN

SEQ ID NO: 779 - protein, 19 aa, synthetic construct
PLNGAVDLYAQAQLSPVQN

SEQ ID NO: 780 - protein, 19 aa, synthetic construct
PLNGAVHLYAQAQVGSVQT

SEQ ID NO: 781 - protein, 19 aa, synthetic construct
PLNGTVHLYAQAQTGWAQN

SEQ ID NO: 782 - protein, 19 aa, synthetic construct
ALNGAVHLYAQAQTGLVQT

SEQ ID NO: 783 - protein, 19 aa, synthetic construct
PLNGAVHLYAQAQSSMVQN

SEQ ID NO: 784 - protein, 19 aa, synthetic construct
PLNGAVHLYAKAQTAGVQN

SEQ ID NO: 785 - protein, 19 aa, synthetic construct
PLNGAVHLYAHAQTGWVQK

SEQ ID NO: 786 - protein, 19 aa, synthetic construct
PLNGAVHLYAQAQTSPVQK

SEQ ID NO: 787 - protein, 19 aa, synthetic construct
PLNGAVHLYAQAQAVGVQN

SEQ ID NO: 788 - protein, 19 aa, synthetic construct
PLNGAVPLYAQAQTGWGQN

SEQ ID NO: 789 - protein, 19 aa, synthetic construct
PLNGTVHLYAQAQLGSVQN

SEQ ID NO: 790 - protein, 19 aa, synthetic construct
QLNGAVHLYAQAQTGWVQH

SEQ ID NO: 791 - protein, 19 aa, synthetic construct
PLNGSVHLYAQAQTGWVKN

SEQ ID NO: 792 - protein, 19 aa, synthetic construct
PLNGAVHLYDQAQVAPVQN

SEQ ID NO: 793 - protein, 19 aa, synthetic construct
PLNGAVNLYAQAQVSSVQN

SEQ ID NO: 794 - protein, 19 aa, synthetic construct
PLNGAVHLYAQAQTLPVQK

SEQ ID NO: 795 - protein, 19 aa, synthetic construct
PLNGSVHLYAQAQTASVQN

SEQ ID NO: 796 - protein, 19 aa, synthetic construct
ALNGAVHLYAQAQTGWGQN

SEQ ID NO: 797 - protein, 19 aa, synthetic construct
PLNGAVHLYAQAQTGWGQN

SEQ ID NO: 798 - protein, 19 aa, synthetic construct
PLNGAAHLYAQAQTSPVQN

SEQ ID NO: 799 - protein, 19 aa, synthetic construct
PLNGAVHLYAQAQTGRVQH

SEQ ID NO: 800 - protein, 19 aa, synthetic construct
PINGAVHLYAQAQTGWVQS

SEQ ID NO: 801 - protein, 19 aa, synthetic construct
PLNGAVHLYAQAQTPSVQN

SEQ ID NO: 802 - protein, 19 aa, synthetic construct
PLNGAVHLYDQAQTTAVQN

SEQ ID NO: 803 - protein, 19 aa, synthetic construct
PLNGNVHLYAQAQTGWVQK

SEQ ID NO: 804 - protein, 19 aa, synthetic construct
PLNGAVHLYAQAQTGWVEN

SEQ ID NO: 805 - protein, 19 aa, synthetic construct
PLNGAVNLYAQAQTTPVQN

SEQ ID NO: 806 - protein, 19 aa, synthetic construct
PLNGAVNLYAQAQLSQVQN

SEQ ID NO: 807 - protein, 19 aa, synthetic construct
SLNGAVHLYAQAQVMSVQN

SEQ ID NO: 808 - protein, 19 aa, synthetic construct
QLNGAVHLYAQAQTGWVQS

SEQ ID NO: 809 - protein, 19 aa, synthetic construct
PINGAVHLYAQAQTGWFQN

SEQ ID NO: 810 - protein, 19 aa, synthetic construct
PLNGDVHLYAQAQVSSVQN

SEQ ID NO: 811 - protein, 19 aa, synthetic construct
PLNGGVHLYAQAQTGWVQS

SEQ ID NO: 812 - protein, 19 aa, synthetic construct
PLNGAVNLYAQAQRSTVQN

SEQ ID NO: 813 - protein, 19 aa, synthetic construct
ALNGAVHLYAQAQTGWVQY

SEQ ID NO: 814 - protein, 19 aa, synthetic construct
PLNGAVHHYAQAQTAAVQN

SEQ ID NO: 815 - protein, 19 aa, synthetic construct
PLNGAVHRYAQAQTGWVQH

SEQ ID NO: 816 - protein, 19 aa, synthetic construct
QLNGAVHLYAQAQTGWVHN

SEQ ID NO: 817 - protein, 19 aa, synthetic construct
PLNGAVHLYAQAQRGWVQN

SEQ ID NO: 818 - protein, 19 aa, synthetic construct
PLNGAVHLYAQAQTGSVEN

SEQ ID NO: 819 - protein, 19 aa, synthetic construct
ALNGAVHLYAQAQTGWVHN

SEQ ID NO: 820 - protein, 19 aa, synthetic construct
PLNGAVNLYAQAQTLAVQN

SEQ ID NO: 821 - protein, 19 aa, synthetic construct
PLNGAVHLYAQAQSSLVQN

SEQ ID NO: 822 - protein, 19 aa, synthetic construct
ALNGAVHLYAQAQTGWLQN

SEQ ID NO: 823 - protein, 19 aa, synthetic construct
TLNGAVHLYAQAQTLQVQN

SEQ ID NO: 824 - protein, 19 aa, synthetic construct
PLNGAVHLYDQAQVQSVQN

SEQ ID NO: 825 - protein, 19 aa, synthetic construct
SLNGAVHLYAQAQVTGVQN

SEQ ID NO: 826 - protein, 19 aa, synthetic construct
QLNGAVHLYAQAQSAVVQN

SEQ ID NO: 827 - protein, 19 aa, synthetic construct
PLNGVVHLYAQAQTGWVQT

SEQ ID NO: 828 - protein, 19 aa, synthetic construct
PLNGAVHLYAQAQTAWVKN

SEQ ID NO: 829 - protein, 19 aa, synthetic construct
TLNGAVHLYAQAQTLPVQN

SEQ ID NO: 830 - protein, 19 aa, synthetic construct
ALNGAVHLYAQAQTTGVQN

SEQ ID NO: 831 - protein, 19 aa, synthetic construct
PLNGAVHLYAKAQTMAVQN

SEQ ID NO: 832 - protein, 19 aa, synthetic construct
PLNGAVHLYAQAQTYSVQN

SEQ ID NO: 833 - protein, 19 aa, synthetic construct
PLNGCVHLYAQAQTGWVQN

SEQ ID NO: 834 - protein, 19 aa, synthetic construct
PLNGAVHLYAQAQLAAVQT

SEQ ID NO: 835 - protein, 19 aa, synthetic construct
PLNGAVHLYAQAQTALVKN

SEQ ID NO: 836 - protein, 19 aa, synthetic construct
PLNGAVHLYAKAQTVAVQN

SEQ ID NO: 837 - protein, 19 aa, synthetic construct
PLNGAVHLYAHAQTGWVQT

SEQ ID NO: 838 - protein, 19 aa, synthetic construct
PLNGGVHLYAQAQRGSVQN

SEQ ID NO: 839 - protein, 19 aa, synthetic construct
PLNGAFHLYAQAQTGGVQN

SEQ ID NO: 840 - protein, 19 aa, synthetic construct
PLNGAVHLYALAQTSPVQN

SEQ ID NO: 841 - protein, 19 aa, synthetic construct
PLNGAVHLYAQAQTGWVQY

SEQ ID NO: 842 - protein, 19 aa, synthetic construct
PLNGAVHLYAQAQTLPVQT

SEQ ID NO: 843 - protein, 19 aa, synthetic construct
PLNGAVHLYSQAQTGWFQN

SEQ ID NO: 844 - protein, 19 aa, synthetic construct
PLNGAVHLYAQAQTGLVQH

SEQ ID NO: 845 - protein, 19 aa, synthetic construct
PLNGAVHLYAQAQTPTVQN

SEQ ID NO: 846 - protein, 19 aa, synthetic construct
PLYGAVHLYAQAQTAWVQN

SEQ ID NO: 847 - protein, 19 aa, synthetic construct
PLNGAVHLYAKAQTASVQN

SEQ ID NO: 848 - protein, 19 aa, synthetic construct
PLNGAVHLYAQAQTASVQK

SEQ ID NO: 849 - protein, 19 aa, synthetic construct
PLDGSVHLYAQAQTAWVQN

SEQ ID NO: 850 - protein, 19 aa, synthetic construct
PLNGADHLYAQAQTSSVQN

SEQ ID NO: 851 - protein, 19 aa, synthetic construct
PLNGAVHLYAQAQTSPVQI

SEQ ID NO: 852 - protein, 19 aa, synthetic construct
PLNGAVHLYAQAQIGWVQN

SEQ ID NO: 853 - protein, 19 aa, synthetic construct
PLNGAVHLYAKAQTSTVQN

SEQ ID NO: 854 - protein, 19 aa, synthetic construct
PLNGAVHRYAQAQTGWVQT

SEQ ID NO: 855 - protein, 19 aa, synthetic construct
PLNGAVHLYDQAQTSTVQN

SEQ ID NO: 856 - protein, 19 aa, synthetic construct
QLNGAVHLYAQAQTGLVQN

SEQ ID NO: 857 - protein, 19 aa, synthetic construct
PLNGAVNLYAQAQLGPVQN

SEQ ID NO: 858 - protein, 19 aa, synthetic construct
PLNGAVHLYAQAQTGWDKN

SEQ ID NO: 859 - protein, 19 aa, synthetic construct
PLNGALHLYAQAQTGWVKN

SEQ ID NO: 860 - protein, 19 aa, synthetic construct
PLNGNVHLYAHAQTGWVQN

SEQ ID NO: 861 - protein, 19 aa, synthetic construct
PLNGAVHLYAQAQKSSVQN

SEQ ID NO: 862 - protein, 19 aa, synthetic construct
PLNGAVHLYAQAQTGYVQN

SEQ ID NO: 863 - protein, 19 aa, synthetic construct
PVNGAVHLYAQAQVGSVQN

SEQ ID NO: 864 - protein, 19 aa, synthetic construct
PLNGGVHLYAQAQTGWVKN

SEQ ID NO: 865 - protein, 19 aa, synthetic construct
PLNGAVHLYAQAQRGWVQT

SEQ ID NO: 866 - protein, 19 aa, synthetic construct
PLNGAVNLYAQAQRSLVQN

SEQ ID NO: 867 - protein, 19 aa, synthetic construct
PINGAVHLYAQAQTGWDQN

SEQ ID NO: 868 - protein, 19 aa, synthetic construct
PLNGNVHLYAQAQTGWVQT

SEQ ID NO: 869 - protein, 19 aa, synthetic construct
PLNGAVHLYAKAQTGWFQN

SEQ ID NO: 870 - protein, 19 aa, synthetic construct
PLNGAVHLYAQEQTSTVQN

SEQ ID NO: 871 - protein, 19 aa, synthetic construct
PLNGAVHLYAQAQTGGVEN

SEQ ID NO: 872 - protein, 19 aa, synthetic construct
PLNGAVHLYSQAQTGWVQI

SEQ ID NO: 873 - protein, 19 aa, synthetic construct
SLNGAVHLYAQAQTGLVQK

SEQ ID NO: 874 - protein, 19 aa, synthetic construct
PLNGAVHLYAQAQTGCVRN

SEQ ID NO: 875 - protein, 19 aa, synthetic construct
PLNGADHLYAQAQVTPVQN

SEQ ID NO: 876 - protein, 19 aa, synthetic construct
PLNGAVHLYAPAQTGWVQT

SEQ ID NO: 877 - protein, 19 aa, synthetic construct
PLNGDVHLYAQAQTSAVQN

SEQ ID NO: 878 - protein, 19 aa, synthetic construct
TLNGAVHLYAQAQSSLVQN

SEQ ID NO: 879 - protein, 19 aa, synthetic construct
SLNGAVHLYAQAQRSVVQN

SEQ ID NO: 880 - protein, 19 aa, synthetic construct
SLNGAVHLYAQAQTGWVQS

SEQ ID NO: 881 - protein, 19 aa, synthetic construct
PVNGAVHLYAQAQTGWVQS

SEQ ID NO: 882 - protein, 19 aa, synthetic construct
PLNGAVHLYAQAQLSPVQS

SEQ ID NO: 883 - protein, 19 aa, synthetic construct
PLNGAVHLYAQPQTGWLQN

SEQ ID NO: 884 - protein, 19 aa, synthetic construct
PLNGAVNLYAQAQSAPVQN

SEQ ID NO: 885 - protein, 19 aa, synthetic construct
PLNGTVHLYAQAQTGWVPN

SEQ ID NO: 886 - protein, 19 aa, synthetic construct
PVDGAVHLYAQAQTGSVQN

SEQ ID NO: 887 - protein, 19 aa, synthetic construct
PLNGAVHLYDQAQTAAVQN

SEQ ID NO: 888 - protein, 19 aa, synthetic construct
PLKGAVHLYAQAQTSTVQN

SEQ ID NO: 889 - protein, 19 aa, synthetic construct
PLNGAVHLYAQAQTGPVQT

SEQ ID NO: 890 - protein, 19 aa, synthetic construct
PLNGAVHLYAQAQTVGVQK

SEQ ID NO: 891 - protein, 19 aa, synthetic construct
PLNGAVNLYAQAQTSTVQN

SEQ ID NO: 892 - protein, 19 aa, synthetic construct
PLNGAVHLYARAQTVSVQN

SEQ ID NO: 893 - protein, 19 aa, synthetic construct
PLNGAVHLYAQAQTASGQN

SEQ ID NO: 894 - protein, 19 aa, synthetic construct
PLNGAVHLYAQAQSVSVQN

SEQ ID NO: 895 - protein, 19 aa, synthetic construct
PLNGAVHLYAQAQSGPVQT

SEQ ID NO: 896 - protein, 19 aa, synthetic construct
QLNGAVHLYAQAQTGWGQN

SEQ ID NO: 897 - protein, 19 aa, synthetic construct
PLNGAVHLYAQAQVMSVKN

SEQ ID NO: 898 - protein, 19 aa, synthetic construct
PLNGTVHLYAKAQTGSVQN

SEQ ID NO: 899 - protein, 19 aa, synthetic construct
PLNGAVNLYAQAQTSLVQN

SEQ ID NO: 900 - protein, 19 aa, synthetic construct
PINGAVHLYAQAQTLSVQN

SEQ ID NO: 901 - protein, 19 aa, synthetic construct
PLNGAVHLYAQAQLGSVQK

SEQ ID NO: 902 - protein, 19 aa, synthetic construct
TLNGAVHLYAQAQTAMVQN

SEQ ID NO: 903 - protein, 19 aa, synthetic construct
PLNGAVHLYAQAHLSSVQN

SEQ ID NO: 904 - protein, 19 aa, synthetic construct
PLNGAVHLYAKAQVMSVQN

SEQ ID NO: 905 - protein, 19 aa, synthetic construct
PLNGAVHLYAQAQTGLVLN

SEQ ID NO: 906 - protein, 19 aa, synthetic construct
PLNGGVHLYAQAQTGWVQK

SEQ ID NO: 907 - protein, 19 aa, synthetic construct
PLNGAVHLYAKAQTGWVQK

SEQ ID NO: 908 - protein, 19 aa, synthetic construct
PLNGAVLLYAQAQTASVQN

SEQ ID NO: 909 - protein, 19 aa, synthetic construct
PLNGDVHLYAQAQTMAVQN

SEQ ID NO: 910 - protein, 19 aa, synthetic construct
PLNGAVHLYAKAQTAAVQN

SEQ ID NO: 911 - protein, 19 aa, synthetic construct
PLNGAVHLYAQAQTGLVQN

SEQ ID NO: 912 - protein, 19 aa, synthetic construct
PLNGDVHLYAQAQSSPVQN

SEQ ID NO: 913 - protein, 19 aa, synthetic construct
PLNGAVHLYAQAQTSNVQN

SEQ ID NO: 914 - protein, 19 aa, synthetic construct
ALDGAVHLYAQAQTGSVQN

SEQ ID NO: 915 - protein, 19 aa, synthetic construct
PLNGAVHLYSQAQTSSVQN

SEQ ID NO: 916 - protein, 19 aa, synthetic construct
PLKGAVHLYAQAQLSPVQN

SEQ ID NO: 917 - protein, 19 aa, synthetic construct
LLNGAVHLYAQAQTVSVQN

SEQ ID NO: 918 - protein, 19 aa, synthetic construct
PLNGGVHLYAQAQTGWVQI

SEQ ID NO: 919 - protein, 19 aa, synthetic construct
PLNGAVHLYSQAQTGWVRN

SEQ ID NO: 920 - protein, 19 aa, synthetic construct
PLNGAVHLYAQAQTGWGHN

SEQ ID NO: 921 - protein, 19 aa, synthetic construct
PHNGAVHLYAQAQTTSVQN

SEQ ID NO: 922 - protein, 19 aa, synthetic construct
PLNRAVHLYAQAQTGWVQK

SEQ ID NO: 923 - protein, 19 aa, synthetic construct
PLNGAVHLYDQAQRASVQN

SEQ ID NO: 924 - protein, 19 aa, synthetic construct
PLNGAVHLYSQAQTGWVQN

SEQ ID NO: 925 - protein, 19 aa, synthetic construct
PLNGSVHLYAQAQTGTVQN

SEQ ID NO: 926 - protein, 19 aa, synthetic construct
PLNGAVHLYDQAQTSGVQN

SEQ ID NO: 927 - protein, 19 aa, synthetic construct
PLNGAVHLYAQAKTGWFQN

SEQ ID NO: 928 - protein, 19 aa, synthetic construct
KLDGAVHLYAQAQTGLVQN

SEQ ID NO: 929 - protein, 19 aa, synthetic construct
PLNGAVHLYAQAQSQMVQN

SEQ ID NO: 930 - protein, 19 aa, synthetic construct
TLNGAVHLYAQAQTSVVQN

SEQ ID NO: 931 - protein, 19 aa, synthetic construct
PLNGAVHLYAKAQTGTVQN

SEQ ID NO: 932 - protein, 19 aa, synthetic construct
PLNGAVHLYAQAQTVSVHN

SEQ ID NO: 933 - protein, 19 aa, synthetic construct
PLNGAVHLYAQAQLSSVQT

SEQ ID NO: 934 - protein, 19 aa, synthetic construct
PVNGAVHLYAQAQTGWFQN

SEQ ID NO: 935 - protein, 19 aa, synthetic construct
PLNGAVHLYAQAQTASVRN

SEQ ID NO: 936 - protein, 19 aa, synthetic construct
PLNGDVHLYAQAQTSTVQN

SEQ ID NO: 937 - protein, 19 aa, synthetic construct
PLNGAVHLYAKAQLGSVQN

SEQ ID NO: 938 - protein, 19 aa, synthetic construct
PINGAVHLYAQAQLVPVQN

SEQ ID NO: 939 - protein, 19 aa, synthetic construct
PLNGAVHHYAQAQLGPVQN

SEQ ID NO: 940 - protein, 19 aa, synthetic construct
PLNGAVHLYAPAQTGWVQH

SEQ ID NO: 941 - protein, 19 aa, synthetic construct
PLNGAVHLYAQAQVPAVQN

SEQ ID NO: 942 - protein, 19 aa, synthetic construct
PLNGAVNLYAQAQRLSVQN

SEQ ID NO: 943 - protein, 19 aa, synthetic construct
PLNGAVHLYAQAQTGRVQK

SEQ ID NO: 944 - protein, 19 aa, synthetic construct
PLNGAVLLYAQAQTVSVQN

SEQ ID NO: 945 - protein, 19 aa, synthetic construct
PLNGAVHLYAQAQAMSVQN

SEQ ID NO: 946 - protein, 19 aa, synthetic construct
PLNGAVHLYAQAQTAWVHN

SEQ ID NO: 947 - protein, 19 aa, synthetic construct
PLNGAVHLYAQPQTGWVRN

SEQ ID NO: 948 - protein, 19 aa, synthetic construct
PLNGAVHLYAQEQTGWLQN

SEQ ID NO: 949 - protein, 19 aa, synthetic construct
PLNGAVHLYAKAQTSAVQN

SEQ ID NO: 950 - protein, 19 aa, synthetic construct
PLNGSVHLYAQAQTVWVQN

SEQ ID NO: 951 - protein, 19 aa, synthetic construct
PLNGTVHLYAQAQTGWFQN

SEQ ID NO: 952 - protein, 19 aa, synthetic construct
PLNGAVNLYAQAQVASVQN

SEQ ID NO: 953 - protein, 19 aa, synthetic construct
PLNGAVHLYAQAQTGLVRN

SEQ ID NO: 954 - protein, 19 aa, synthetic construct
PLNGAVNLYAQAQLSTVQN

SEQ ID NO: 955 - protein, 19 aa, synthetic construct
PLNGAVHLYAKAQTQPVQN

SEQ ID NO: 956 - protein, 19 aa, synthetic construct
PLNGTVHLYAQAQTGWGQN

SEQ ID NO: 957 - protein, 19 aa, synthetic construct
PLNGAVHLYAQAQRTLVQT

SEQ ID NO: 958 - protein, 19 aa, synthetic construct
PLNGAVHLYAQAQTGSIQN

SEQ ID NO: 959 - protein, 19 aa, synthetic construct
QLNGAVHLYAQAQTGWDQN

SEQ ID NO: 960 - protein, 19 aa, synthetic construct
PLNGAVHLYAQAQLSSVKN

SEQ ID NO: 961 - protein, 19 aa, synthetic construct
QLNGAVHLYAQAQTVSVQN

SEQ ID NO: 962 - protein, 19 aa, synthetic construct
PLNGAVHLYAQAQTLQVQK

SEQ ID NO: 963 - protein, 19 aa, synthetic construct
TLNGAVHLYAQAQVLPVQN

SEQ ID NO: 964 - protein, 19 aa, synthetic construct
PLNGAVHLYAQAQVGSVKN

SEQ ID NO: 965 - protein, 19 aa, synthetic construct
PLNGAVHLYAQAQLAPLQN

SEQ ID NO: 966 - protein, 19 aa, synthetic construct
QLNGAVHLYAQAQTGSVKN

SEQ ID NO: 967 - protein, 19 aa, synthetic construct
PLNGAVHHYAQAQRSTVQN

SEQ ID NO: 968 - protein, 19 aa, synthetic construct
QLNGSVHLYAQAQTGRVQN

SEQ ID NO: 969 - protein, 19 aa, synthetic construct
TLNGAVHLYAQAQVKPVQN

SEQ ID NO: 970 - protein, 19 aa, synthetic construct
PLNGTVHLYAQAQTGLVQN

SEQ ID NO: 971 - protein, 19 aa, synthetic construct
PLNGAVHLYAQAQTPGVQN

SEQ ID NO: 972 - protein, 19 aa, synthetic construct
PINGAVHLYAQAQTSSVQN

SEQ ID NO: 973 - protein, 19 aa, synthetic construct
PLNGAVHLYAQAQLSAVQT

SEQ ID NO: 974 - protein, 19 aa, synthetic construct
PLNGAVHLYSQAQTGWDQN

SEQ ID NO: 975 - protein, 19 aa, synthetic construct
PLNCAVHLYAQAQTGWVQN

SEQ ID NO: 976 - protein, 19 aa, synthetic construct
PLNGAVNLYAQAQTMPVQN

SEQ ID NO: 977 - protein, 19 aa, synthetic construct
PLNGAVHLYSQAQTVAVQN

SEQ ID NO: 978 - protein, 19 aa, synthetic construct
PLNGTVHLYAQAQTGWVKN

SEQ ID NO: 979 - protein, 19 aa, synthetic construct
PLNGGVHLYAQAQTGWVHN

SEQ ID NO: 980 - protein, 19 aa, synthetic construct
QLNGAVHLYAQAQTGWVQK

SEQ ID NO: 981 - protein, 19 aa, synthetic construct
PLNGAVQLYAQAQTLAVQN

SEQ ID NO: 982 - protein, 19 aa, synthetic construct
PLNGTVHLYAQAQVGSVQN

SEQ ID NO: 983 - protein, 19 aa, synthetic construct
PLNGGVHLYAQAQTGGVQN

SEQ ID NO: 984 - protein, 19 aa, synthetic construct
PLKGAVHLYAQAQVSQVQN

SEQ ID NO: 985 - protein, 19 aa, synthetic construct
PLNGAVHHYAQAQTQPVQN

SEQ ID NO: 986 - protein, 19 aa, synthetic construct
PLNGAVHLYAQAPTGWVQT

SEQ ID NO: 987 - protein, 19 aa, synthetic construct
PLNGAVNLYAQAQTMSVQN

SEQ ID NO: 988 - protein, 19 aa, synthetic construct
PLNGAVHLYAQAQTGVVQN

SEQ ID NO: 989 - protein, 19 aa, synthetic construct
PLNGAVHLYAQAQVPQVQN

SEQ ID NO: 990 - protein, 19 aa, synthetic construct
PHNGAVHLYAQAQTMSVQN

SEQ ID NO: 991 - protein, 19 aa, synthetic construct
QLNGAVHLYAQAQTGWLQN

SEQ ID NO: 992 - protein, 19 aa, synthetic construct
PLNGAVHLYAQAQTGCVQK

SEQ ID NO: 993 - protein, 19 aa, synthetic construct
SLNGAVHLYAQAQTSLVQN

SEQ ID NO: 994 - protein, 19 aa, synthetic construct
PLNGAVHLYAQAQTRWVQT

SEQ ID NO: 995 - protein, 19 aa, synthetic construct
TLNGAVHLYAQAQTVQVQN

SEQ ID NO: 996 - protein, 19 aa, synthetic construct
ALNGAVHLYAQAQKGGVQN

SEQ ID NO: 997 - protein, 19 aa, synthetic construct
PLNGAVHLYDQAQVSGVQN

SEQ ID NO: 998 - protein, 19 aa, synthetic construct
PLNGAVHLYAQAQTGLDQN

SEQ ID NO: 999 - protein, 19 aa, synthetic construct
PLNGAVPLYAQAQTGWVQT

SEQ ID NO: 1000 - protein, 19 aa, synthetic construct
PLNGAVHLYAQAQVSSVHN

SEQ ID NO: 1001 - protein, 19 aa, synthetic construct
TLNGAVHLYAQAQTNSVQN

SEQ ID NO: 1002 - protein, 19 aa, synthetic construct
PLNGAGHLYAQAQLSPVQN

SEQ ID NO: 1003 - protein, 19 aa, synthetic construct
HLNGAVHLYAQAQTGRVQN

SEQ ID NO: 1004 - protein, 19 aa, synthetic construct
PLNGAVHLYDQAQTAMVQN

SEQ ID NO: 1005 - protein, 19 aa, synthetic construct
PINGAVHLYAQAQTGWVQH

SEQ ID NO: 1006 - protein, 19 aa, synthetic construct
PLNGAVQLYAQAQTLQVQN

SEQ ID NO: 1007 - protein, 19 aa, synthetic construct
PLNGAVHLYAQAQKGWVQT

SEQ ID NO: 1008 - protein, 19 aa, synthetic construct
PLNGAVHHYAQAQSTSVQN

SEQ ID NO: 1009 - protein, 19 aa, synthetic construct
PLNGYVHLYAQAQTGWVQN

SEQ ID NO: 1010 - protein, 19 aa, synthetic construct
PLNGAVHIYAQAQVQSVQN

SEQ ID NO: 1011 - protein, 19 aa, synthetic construct
PLIGAVHLYAQAQLSPVQN

SEQ ID NO: 1012 - protein, 19 aa, synthetic construct
TLNGAVHLYAQAQLLPVQN

SEQ ID NO: 1013 - protein, 19 aa, synthetic construct
PLNGAVHLYSQAQTGWVQT

SEQ ID NO: 1014 - protein, 19 aa, synthetic construct
ALNGAVHLYAQAQTQLVQN

SEQ ID NO: 1015 - protein, 19 aa, synthetic construct
PLNGAVHLYAQAQSLPVQN

SEQ ID NO: 1016 - protein, 19 aa, synthetic construct
PVNGAVHLYAQAQTGWVPN

SEQ ID NO: 1017 - protein, 19 aa, synthetic construct
PLNGAVHLYAQAKTVSVQN

SEQ ID NO: 1018 - protein, 19 aa, synthetic construct
PLNGAVHLYAQAQTTSVHN

SEQ ID NO: 1019 - protein, 19 aa, synthetic construct
PVNGAVHLYAQAQTGWVQN

SEQ ID NO: 1020 - protein, 19 aa, synthetic construct
PLNGAVHLYAQAHTGWVQI

SEQ ID NO: 1021 - protein, 19 aa, synthetic construct
PLNGAVRLYAQAQTASVQN

SEQ ID NO: 1022 - protein, 19 aa, synthetic construct
PLNGGVHLYAQAQTGLVQK

SEQ ID NO: 1023 - protein, 19 aa, synthetic construct
PLNGAVNLYAQAQVMSVQN

SEQ ID NO: 1024 - protein, 19 aa, synthetic construct
PLNGAVNLYAQAQSMSVQN

SEQ ID NO: 1025 - protein, 19 aa, synthetic construct
PLNGAVHLYAPAQTGWGQN

SEQ ID NO: 1026 - protein, 19 aa, synthetic construct
QLNGAVHLYAQAQTGWAQN

SEQ ID NO: 1027 - protein, 19 aa, synthetic construct
PLNGAVHLYAQAQTVWVQN

SEQ ID NO: 1028 - protein, 19 aa, synthetic construct
QLNGAVHLYAQAQSVSVQN

SEQ ID NO: 1029 - protein, 19 aa, synthetic construct
PLNGAVHLYAQAQTAQLQN

SEQ ID NO: 1030 - protein, 19 aa, synthetic construct
PLNGAVHLYAQAHVASVQN

SEQ ID NO: 1031 - protein, 19 aa, synthetic construct
PLNGAVHLYAKAQRSTVQN

SEQ ID NO: 1032 - protein, 19 aa, synthetic construct
QLNGAVHLYAQAQTGWVKN

SEQ ID NO: 1033 - protein, 19 aa, synthetic construct
PLNGAVHLYAQAQTRWVKN

SEQ ID NO: 1034 - protein, 19 aa, synthetic construct
PLNGAVHLYAQAQTAWIQN

SEQ ID NO: 1035 - protein, 19 aa, synthetic construct
PLNGAVHLYAQAQLSQVKN

SEQ ID NO: 1036 - protein, 19 aa, synthetic construct
SLNGAVHLYAQAQTGWVQN

SEQ ID NO: 1037 - protein, 19 aa, synthetic construct
PLNGAVHLYAQAQTSTVKN

SEQ ID NO: 1038 - protein, 19 aa, synthetic construct
PLNGAVHLYAQAQALPVQN

SEQ ID NO: 1039 - protein, 19 aa, synthetic construct
PLNGAVHLYDQAQTGWFQN

SEQ ID NO: 1040 - protein, 19 aa, synthetic construct
PLNGAVHVYAQAQTGWFQN

SEQ ID NO: 1041 - protein, 19 aa, synthetic construct
PINGAVHLYAQAQVGSVQN

SEQ ID NO: 1042 - protein, 19 aa, synthetic construct
PLNGSVHLYAQAQTTGVQN

SEQ ID NO: 1043 - protein, 19 aa, synthetic construct
PLNGAVHLYAKAQASPVQN

SEQ ID NO: 1044 - protein, 19 aa, synthetic construct
PLNGSVHLYAQAQKAWVQN

SEQ ID NO: 1045 - protein, 19 aa, synthetic construct
SLNGAVHLYAQAQVLGVQN

SEQ ID NO: 1046 - protein, 19 aa, synthetic construct
PLNGAVHLYAQEQLMPVQN

SEQ ID NO: 1047 - protein, 19 aa, synthetic construct
ALNGAVHLYAQSQTGWVQN

SEQ ID NO: 1048 - protein, 19 aa, synthetic construct
PLNGYVHLYDQAQTGWVQN

SEQ ID NO: 1049 - protein, 19 aa, synthetic construct
PLNGAVHLYAQAQTSMVQT

SEQ ID NO: 1050 - protein, 19 aa, synthetic construct
QLNGAVHLYAQAQISSVQN

SEQ ID NO: 1051 - protein, 19 aa, synthetic construct
PVNGAVHLYAQAQTGWVQT

SEQ ID NO: 1052 - protein, 19 aa, synthetic construct
PLNGAVHLYAQEQTATVQN

SEQ ID NO: 1053 - protein, 19 aa, synthetic construct
PLNGAVYLYAQAQTVSVQN

SEQ ID NO: 1054 - protein, 19 aa, synthetic construct
PLNGNVHLYAQAQTASVQN

SEQ ID NO: 1055 - protein, 19 aa, synthetic construct
PLNGYVHLYAQAQTGLVQN

SEQ ID NO: 1056 - protein, 19 aa, synthetic construct
PLNGAVHLYDQAQTLSVQN

SEQ ID NO: 1057 - protein, 19 aa, synthetic construct
PLNGAVHLYAQAQTSSVQH

SEQ ID NO: 1058 - protein, 19 aa, synthetic construct
SLNGAVHLYAQAQTGWVPN

SEQ ID NO: 1059 - protein, 19 aa, synthetic construct
PLNGAVHLYAQAQTAMVKN

SEQ ID NO: 1060 - protein, 19 aa, synthetic construct
TLNGAVHLYAQAQRLSVQN

SEQ ID NO: 1061 - protein, 19 aa, synthetic construct
ALNGAVHLYAQAQTGWVQK

SEQ ID NO: 1062 - protein, 19 aa, synthetic construct
PLNGAVHLYAKAQTALVQN

SEQ ID NO: 1063 - protein, 19 aa, synthetic construct
QLNGAVHLYAQAQTAKVQN

SEQ ID NO: 1064 - protein, 19 aa, synthetic construct
PLNGADHLYAQAQTTSVQN

SEQ ID NO: 1065 - protein, 19 aa, synthetic construct
PLNGAVHLYAQAQTPWVQN

SEQ ID NO: 1066 - protein, 19 aa, synthetic construct
PLNGTVHLYAQAQTGWIQN

SEQ ID NO: 1067 - protein, 19 aa, synthetic construct
PLNGAVHLYAQAHTGWVQH

SEQ ID NO: 1068 - protein, 19 aa, synthetic construct
PLNGAVHLYARAQTASVQN

SEQ ID NO: 1069 - protein, 19 aa, synthetic construct
TLNGAVHLYAQAQRSLVQN

SEQ ID NO: 1070 - protein, 19 aa, synthetic construct
PLNGAVHLYAQAHTGWVQK

SEQ ID NO: 1071 - protein, 19 aa, synthetic construct
PLNGDVHLYAQAQTAQVQN

SEQ ID NO: 1072 - protein, 19 aa, synthetic construct
TLNGAVHLYAQAQTQPVQN

SEQ ID NO: 1073 - protein, 19 aa, synthetic construct
PLNGAVHLYAQAQTPRVQN

SEQ ID NO: 1074 - protein, 19 aa, synthetic construct
PRNGAVHLYAQAQTMSVQN

SEQ ID NO: 1075 - protein, 19 aa, synthetic construct
PLNGAVHLYAQAHTVSVQN

SEQ ID NO: 1076 - protein, 19 aa, synthetic construct
PVNGAVHLYAQAQTGLVQT

SEQ ID NO: 1077 - protein, 19 aa, synthetic construct
PLNGAVHLYAQAQSSSVQN

SEQ ID NO: 1078 - protein, 19 aa, synthetic construct
PLNGAVHLYAQAQRPPVQN

SEQ ID NO: 1079 - protein, 19 aa, synthetic construct
PLNGAVHLYTQAQVSPVQN

SEQ ID NO: 1080 - protein, 19 aa, synthetic construct
PLNGAVPLYAQAQTTPVQN

SEQ ID NO: 1081 - protein, 19 aa, synthetic construct
ALNGAVHLYAQAQTGWVKN

SEQ ID NO: 1082 - protein, 19 aa, synthetic construct
SLNGAVHLYAQAQTGWVRN

SEQ ID NO: 1083 - protein, 19 aa, synthetic construct
PLNGAVHLYAQAQLAGVKN

SEQ ID NO: 1084 - protein, 19 aa, synthetic construct
PLNGAVHLYAQAQTSPAQN

SEQ ID NO: 1085 - protein, 19 aa, synthetic construct
PLNGAVHLYAKAQLSSVQN

SEQ ID NO: 1086 - protein, 19 aa, synthetic construct
PLNGAVHLYAQAQRSPVQT

SEQ ID NO: 1087 - protein, 19 aa, synthetic construct
PLNGAVHLYAHAQTMSVQN

SEQ ID NO: 1088 - protein, 19 aa, synthetic construct
PLNGNVHLYAQAQTGWVKN

SEQ ID NO: 1089 - protein, 19 aa, synthetic construct
PLNGAVHLYAQAQTGWVPH

SEQ ID NO: 1090 - protein, 19 aa, synthetic construct
PLNGAVHLYAQAQPGWGQN

SEQ ID NO: 1091 - protein, 19 aa, synthetic construct
PLNGVVHLYAQAQTVSVQN

SEQ ID NO: 1092 - protein, 19 aa, synthetic construct
PLNGDVHLYAQAQTSSVQN

SEQ ID NO: 1093 - protein, 19 aa, synthetic construct
PLNGAVHIYAQAQTLSVQN

SEQ ID NO: 1094 - protein, 19 aa, synthetic construct
PLNGAVHLYAQAQIPPVQN

SEQ ID NO: 1095 - protein, 19 aa, synthetic construct
SLNGAVHLYAQAQTGWVQH

SEQ ID NO: 1096 - protein, 19 aa, synthetic construct
PLNAAVHLYAQAQTGWDQN

SEQ ID NO: 1097 - protein, 19 aa, synthetic construct
PLNGAVHRYAQAQTTSVQN

SEQ ID NO: 1098 - protein, 19 aa, synthetic construct
PLNGSVHLYAQAQPGSVQN

SEQ ID NO: 1099 - protein, 19 aa, synthetic construct
PLDGAVHLYAQAQTGWVEN

SEQ ID NO: 1100 - protein, 19 aa, synthetic construct
PLNGAVHLYAQAQTGRVKN

SEQ ID NO: 1101 - protein, 19 aa, synthetic construct
PLNGAVHLYAQAQTGRLQN

SEQ ID NO: 1102 - protein, 19 aa, synthetic construct
PLNGSVHLYAQAQTARVQN

SEQ ID NO: 1103 - protein, 19 aa, synthetic construct
PLNGAVHLYDQAQLSSVQN

SEQ ID NO: 1104 - protein, 19 aa, synthetic construct
ALNGAVHLYAQAQTRLVQN

SEQ ID NO: 1105 - protein, 19 aa, synthetic construct
PLNGAVNLYAQAQTAQVQN

SEQ ID NO: 1106 - protein, 19 aa, synthetic construct
PLNGAVHLYAQAQLSSVQH

SEQ ID NO: 1107 - protein, 19 aa, synthetic construct
PLNGAVHLYAQAHTGPVQN

SEQ ID NO: 1108 - protein, 19 aa, synthetic construct
PLKGAVHLYAQAQTLSVQN

SEQ ID NO: 1109 - protein, 19 aa, synthetic construct
ALNGAVHLYAQAQKAWVQN

SEQ ID NO: 1110 - protein, 19 aa, synthetic construct
PLNGAVHLYAQAQAGWVQT

SEQ ID NO: 1111 - protein, 19 aa, synthetic construct
PLNGAVHLYAQAQTGLVQS

SEQ ID NO: 1112 - protein, 19 aa, synthetic construct
PLNGAVHLYAQAQTGCVQI

SEQ ID NO: 1113 - protein, 19 aa, synthetic construct
QLNGAVHLYAQAQPGWVQN

SEQ ID NO: 1114 - protein, 19 aa, synthetic construct
PLNGAVHLYAQAQRPGVQN

SEQ ID NO: 1115 - protein, 19 aa, synthetic construct
PLNGAVHLYAQAQTAAVQH

SEQ ID NO: 1116 - protein, 19 aa, synthetic construct
PLNGADHLYAQAQTMPVQN

SEQ ID NO: 1117 - protein, 19 aa, synthetic construct
PLNGAVHLYAKAQTGWVQT

SEQ ID NO: 1118 - protein, 19 aa, synthetic construct
QLNGAVHLYAQAQKAWVQN

SEQ ID NO: 1119 - protein, 19 aa, synthetic construct
PLNGAVHLYAQAQTGCDQN

SEQ ID NO: 1120 - protein, 19 aa, synthetic construct
PLNGTVHLYAQEQTGSVQN

SEQ ID NO: 1121 - protein, 19 aa, synthetic construct
PLNGAVNLYAQAQSSLVQN

SEQ ID NO: 1122 - protein, 19 aa, synthetic construct
ALNGAVHLYAQAQTGWVEN

SEQ ID NO: 1123 - protein, 19 aa, synthetic construct
PLNGTVHLYAQAQTGWVQY

SEQ ID NO: 1124 - protein, 19 aa, synthetic construct
PINGAVHLYAQAQTGWVQK

SEQ ID NO: 1125 - protein, 19 aa, synthetic construct
PLNGAVHLYAQAQTGRVRN

SEQ ID NO: 1126 - protein, 19 aa, synthetic construct
PLNGAVHLYAQAQTGRDQN

SEQ ID NO: 1127 - protein, 19 aa, synthetic construct
QLNGAVHLYAQAQSALVQN

SEQ ID NO: 1128 - protein, 19 aa, synthetic construct
PLNGVVHLYAQAQTGWVQK

SEQ ID NO: 1129 - protein, 19 aa, synthetic construct
PLNGAVHLYAQAHTGWGQN

SEQ ID NO: 1130 - protein, 19 aa, synthetic construct
PLNGDVHLYAQAQRSLVQN

SEQ ID NO: 1131 - protein, 19 aa, synthetic construct
PLNGNVHLYAQAQTVWVQN

SEQ ID NO: 1132 - protein, 19 aa, synthetic construct
PLNGAVHLYAQAPTGWVQH

SEQ ID NO: 1133 - protein, 19 aa, synthetic construct
PLNGAVHLYSQAQTGWGQN

SEQ ID NO: 1134 - protein, 19 aa, synthetic construct
ALNGSVHLYAQAQTGWVQT

SEQ ID NO: 1135 - protein, 19 aa, synthetic construct
PLNGAVQLYAQAQRSTVQN

SEQ ID NO: 1136 - protein, 19 aa, synthetic construct
PLNGTVHLYAQAQTGTVQN

SEQ ID NO: 1137 - protein, 19 aa, synthetic construct
PLNGTVHLYAQAQTGWVQI

SEQ ID NO: 1138 - protein, 19 aa, synthetic construct
QLNGYVHLYAQAQTGWVQN

SEQ ID NO: 1139 - protein, 16 aa, synthetic construct
PLNNPGHLYAQAQTGW

SEQ ID NO: 1140 - protein, 16 aa, synthetic construct
PLNGVKALYAQAQTGW

SEQ ID NO: 1141 - protein, 16 aa, synthetic construct
PLNGARMIYAQAQTGW

SEQ ID NO: 1142 - protein, 16 aa, synthetic construct
PLNGVKMLYAQAQTGW

SEQ ID NO: 1143 - protein, 16 aa, synthetic construct
PLNGVRALYAQAQTGW

SEQ ID NO: 1144 - protein, 16 aa, synthetic construct
PLNGVRSLYAQAQTGW

SEQ ID NO: 1145 - protein, 16 aa, synthetic construct
PLNGTRMLYAQAQTGW

SEQ ID NO: 1146 - protein, 16 aa, synthetic construct
PLNGVRTLYAQAQTGW

SEQ ID NO: 1147 - protein, 16 aa, synthetic construct
PLNGVRMLYAQAQTGW

SEQ ID NO: 1148 - protein, 16 aa, synthetic construct
PLNGARMLYAQAQTGW

SEQ ID NO: 1149 - protein, 16 aa, synthetic construct
PLNGAKMLYAQAQTGW

SEQ ID NO: 1150 - protein, 16 aa, synthetic construct
PLNGVKSLYAQAQTGW

SEQ ID NO: 1151 - protein, 16 aa, synthetic construct
PLNGVQMLYAQAQTGW

SEQ ID NO: 1152 - protein, 16 aa, synthetic construct
PSARAVHLYAQAQTGW

SEQ ID NO: 1153 - protein, 16 aa, synthetic construct
PLNGTRSLYAQAQTGW

SEQ ID NO: 1154 - protein, 16 aa, synthetic construct
PLNGVRQLYAQAQTGW

SEQ ID NO: 1155 - protein, 16 aa, synthetic construct
PLNGAQMLYAQAQTGW

SEQ ID NO: 1156 - protein, 16 aa, synthetic construct
PLNGVKYLYAQAQTGW

SEQ ID NO: 1157 - protein, 16 aa, synthetic construct
PLNGARTIYAQAQTGW

SEQ ID NO: 1158 - protein, 16 aa, synthetic construct
TLNGAVHLNAQGQTGW

SEQ ID NO: 1159 - protein, 16 aa, synthetic construct
PLNGAGADYAQAQTGW

SEQ ID NO: 1160 - protein, 16 aa, synthetic construct
PLNMPGHLYAQAQTGW

SEQ ID NO: 1161 - protein, 16 aa, synthetic construct
PLNGVQALYAQAQTGW

SEQ ID NO: 1162 - protein, 16 aa, synthetic construct
SLNGAVHLYVQAQTGS

SEQ ID NO: 1163 - protein, 16 aa, synthetic construct
PLNGVKTLYAQAQTGW

SEQ ID NO: 1164 - protein, 16 aa, synthetic construct
SLNGAVHLSAQAQAGW

SEQ ID NO: 1165 - protein, 16 aa, synthetic construct
SINGPVHLYAQAQTGW

SEQ ID NO: 1166 - protein, 16 aa, synthetic construct
PLNGGVHLSVQAQTGW

SEQ ID NO: 1167 - protein, 16 aa, synthetic construct
PLNGAGHLNAQAQTRW

SEQ ID NO: 1168 - protein, 16 aa, synthetic construct
ALNGAVHVSAQAQTGW

SEQ ID NO: 1169 - protein, 16 aa, synthetic construct
PLNLVGHLYAQAQTGW

SEQ ID NO: 1170 - protein, 16 aa, synthetic construct
PLNLTGHLYAQAQTGW

SEQ ID NO: 1171 - protein, 16 aa, synthetic construct
PGRQAVHLYAQAQTGW

SEQ ID NO: 1172 - protein, 16 aa, synthetic construct
LVNSTVRLNAQVQTGW

SEQ ID NO: 1173 - protein, 9 aa, synthetic construct
AQAQAQTGW

SEQ ID NO: 1174 - protein, 19 aa, synthetic construct
PLNSAVHLYAQAQTGWVKN

SEQ ID NO: 1175 - protein, 19 aa, synthetic construct
PLSGAVHLYAQAQTGWVKN

SEQ ID NO: 1176 - protein, 19 aa, synthetic construct
PPNGAVHLYAQAQTGWVKN

SEQ ID NO: 1177 - protein, 19 aa, synthetic construct
PRNGAVHLYAQAQTGWVKN

SEQ ID NO: 1178 - protein, 19 aa, synthetic construct
PVNGAVHLYAQAQTGWVKN

SEQ ID NO: 1179 - protein, 19 aa, synthetic construct
QLNGAVHIYAQAQTGWVKN

SEQ ID NO: 1180 - protein, 19 aa, synthetic construct
QLNGAVHLYAQAQTGCVKN

SEQ ID NO: 1181 - protein, 19 aa, synthetic construct
QLNGAVHLYAQAQTGLVKN

SEQ ID NO: 1182 - protein, 19 aa, synthetic construct
QLNGAVHLYDQAQTGWVKN

SEQ ID NO: 1183 - protein, 19 aa, synthetic construct
RLNGAVHLYAQAQTGWVKN

SEQ ID NO: 1184 - protein, 19 aa, synthetic construct
SINGAVHLYAQAQTGWVKN

SEQ ID NO: 1185 - protein, 19 aa, synthetic construct
SLNGAVHLYAQAQTGWVKN

SEQ ID NO: 1186 - protein, 19 aa, synthetic construct
SLNGAVNLYAQAQTGWVKN

SEQ ID NO: 1187 - protein, 19 aa, synthetic construct
TLNGAVHLYAQAQTGWVKN

SEQ ID NO: 1188 - protein, 19 aa, synthetic construct
TLNGAVNLYAQAQTGWVKN

SEQ ID NO: 1189 - protein, 19 aa, synthetic construct
PLNGAVHHYAQAQTGWVPN

SEQ ID NO: 1190 - protein, 19 aa, synthetic construct
PLNGAVHLNAQAQTGWVPN

SEQ ID NO: 1191 - protein, 19 aa, synthetic construct
PLNGAVHLSAQAQTGWVPN

SEQ ID NO: 1192 - protein, 19 aa, synthetic construct
PLNGAVHLYAQAQTGCVPN

SEQ ID NO: 1193 - protein, 19 aa, synthetic construct
PLNGAVNLYAQAQTGWVPN

SEQ ID NO: 1194 - protein, 12 aa, synthetic construct
AQAQAQTGWVQN

SEQ ID NO: 1195 - protein, 20 aa, synthetic construct
VATNHQSAQAQAQTGWVQNQ

SEQ ID NO: 1196 - protein, 12 aa, synthetic construct
TNHQSAQAQAQT

SEQ ID NO: 1197 - protein, 7 aa, synthetic construct
AQAQAQT

SEQ ID NO: 1198 - protein, 13 aa, synthetic construct
ATNHQSAQAQAQT

SEQ ID NO: 1199-1261 - skipped (63 entries)

SEQ ID NO: 1262 - protein, 7 aa, synthetic construct
TLAVPFK

SEQ ID NO: 1263-1724 - skipped (462 entries)

SEQ ID NO: 1725 - protein, 10 aa, synthetic construct
PLNGAVHLYA

SEQ ID NO: 1726 - protein, 10 aa, synthetic construct
AQARDSPKGW

SEQ ID NO: 1727 - protein, 10 aa, synthetic construct
LTNGAVRDRP

SEQ ID NO: 1728 - protein, 10 aa, synthetic construct
VQAFTHDSRG

SEQ ID NO: 1729 - protein, 10 aa, synthetic construct
AQAYSTDVRM

SEQ ID NO: 1730 - protein, 10 aa, synthetic construct
AQAYSTDVRI

SEQ ID NO: 1731 - protein, 10 aa, synthetic construct
AQAFTAAERM

SEQ ID NO: 1732 - protein, 10 aa, synthetic construct
AQTHLQIGVA

SEQ ID NO: 1733 - protein, 10 aa, synthetic construct
AQSNAVLSLA

SEQ ID NO: 1734 - protein, 10 aa, synthetic construct
AQAYSTDERM

SEQ ID NO: 1735 - protein, 10 aa, synthetic construct
AQAYSTDVRL

SEQ ID NO: 1736 - protein, 10 aa, synthetic construct
AQATVSTLRM

SEQ ID NO: 1737 - protein, 10 aa, synthetic construct
AQAYSTDERK

SEQ ID NO: 1738 - protein, 10 aa, synthetic construct
AQAYSTDMRM

SEQ ID NO: 1739 - protein, 10 aa, synthetic construct
VVNGAVLHVA

SEQ ID NO: 1740 - protein, 10 aa, synthetic construct
AQAYSTDVTM

SEQ ID NO: 1741 - protein, 10 aa, synthetic construct
AQAHLQIGVA

SEQ ID NO: 1742 - protein, 10 aa, synthetic construct
FLDPAVSSKA

SEQ ID NO: 1743 - protein, 10 aa, synthetic construct
AQAYVSTLRM

SEQ ID NO: 1744 - protein, 10 aa, synthetic construct
AQAQTGPPLK

SEQ ID NO: 1745 - protein, 10 aa, synthetic construct
EQASRLPTPG

SEQ ID NO: 1746 - protein, 10 aa, synthetic construct
AQASVSTMRM

SEQ ID NO: 1747 - protein, 10 aa, synthetic construct
TDYSAVRLGA

SEQ ID NO: 1748 - protein, 10 aa, synthetic construct
TQAYSTDVRM

SEQ ID NO: 1749 - protein, 10 aa, synthetic construct
AQALPSNERL

SEQ ID NO: 1750 - protein, 10 aa, synthetic construct
AQAYSTDVRT

SEQ ID NO: 1751 - protein, 10 aa, synthetic construct
AQSSLPEMVA

SEQ ID NO: 1752 - protein, 10 aa, synthetic construct
AQAGEQSTRL

SEQ ID NO: 1753 - protein, 10 aa, synthetic construct
AQASNDVGRA

SEQ ID NO: 1754 - protein, 10 aa, synthetic construct
AQATFTASEY

SEQ ID NO: 1755 - protein, 10 aa, synthetic construct
AKAHAGTIYS

SEQ ID NO: 1756 - protein, 10 aa, synthetic construct
AQARTIDQCC

SEQ ID NO: 1757 - protein, 10 aa, synthetic construct
AQEYNSNPKA

SEQ ID NO: 1758 - protein, 10 aa, synthetic construct
AQVVDNSTHA

SEQ ID NO: 1759 - protein, 10 aa, synthetic construct
AQATLSVPLK

SEQ ID NO: 1760 - protein, 10 aa, synthetic construct
AQIVMNSLKA

SEQ ID NO: 1761 - protein, 10 aa, synthetic construct
AQATMSQTMA

SEQ ID NO: 1762 - protein, 10 aa, synthetic construct
AQALTQDERW

SEQ ID NO: 1763 - protein, 10 aa, synthetic construct
AQAQLSTLRP

SEQ ID NO: 1764 - protein, 10 aa, synthetic construct
AQVVMGISVA

SEQ ID NO: 1765 - protein, 10 aa, synthetic construct
AQAYTTDVRM

SEQ ID NO: 1766 - protein, 10 aa, synthetic construct
AQHIDSMRPP

SEQ ID NO: 1767 - protein, 10 aa, synthetic construct
AQASTGTLRL

SEQ ID NO: 1768 - protein, 10 aa, synthetic construct
AQHRALDYYA

SEQ ID NO: 1769 - protein, 10 aa, synthetic construct
AQARESPRGL

SEQ ID NO: 1770 - protein, 10 aa, synthetic construct
AQALLAGTRV

SEQ ID NO: 1771 - protein, 10 aa, synthetic construct
TKIQAVPWNA

SEQ ID NO: 1772 - protein, 10 aa, synthetic construct
AQASLSSTRP

SEQ ID NO: 1773 - protein, 10 aa, synthetic construct
AQAMGSRSDQ

SEQ ID NO: 1774 - protein, 10 aa, synthetic construct
AQAAQGTYRG

SEQ ID NO: 1775 - protein, 10 aa, synthetic construct
SQENAVFSKA

SEQ ID NO: 1776 - protein, 10 aa, synthetic construct
AQALSLSTRP

SEQ ID NO: 1777 - protein, 10 aa, synthetic construct
AQAAAGTLRD

SEQ ID NO: 1778 - protein, 10 aa, synthetic construct
AQASRLPTPG

SEQ ID NO: 1779 - protein, 10 aa, synthetic construct
AQAGSLSERG

SEQ ID NO: 1780 - protein, 10 aa, synthetic construct
AQSKGDGFTA

SEQ ID NO: 1781 - protein, 10 aa, synthetic construct
GAGTAVTATA

SEQ ID NO: 1782 - protein, 10 aa, synthetic construct
AQAQGSSSVG

SEQ ID NO: 1783 - protein, 10 aa, synthetic construct
AQAYSTDARM

SEQ ID NO: 1784 - protein, 10 aa, synthetic construct
ERAHAVTGLA

SEQ ID NO: 1785 - protein, 10 aa, synthetic construct
AQAYGLPKGP

SEQ ID NO: 1786 - protein, 10 aa, synthetic construct
AQAYSTEVRM

SEQ ID NO: 1787 - protein, 10 aa, synthetic construct
AQAGVSTALH

SEQ ID NO: 1788 - protein, 10 aa, synthetic construct
AQSYSTDVRM

SEQ ID NO: 1789 - protein, 10 aa, synthetic construct
AQPLMSHTDA

SEQ ID NO: 1790 - protein, 10 aa, synthetic construct
AQAAALASRP

SEQ ID NO: 1791 - protein, 10 aa, synthetic construct
AQAAITSTIS

SEQ ID NO: 1792 - protein, 10 aa, synthetic construct
AQPANDGLRA

SEQ ID NO: 1793 - protein, 10 aa, synthetic construct
AQDYSTDVRM

SEQ ID NO: 1794 - protein, 10 aa, synthetic construct
AQATLGYSTA

SEQ ID NO: 1795 - protein, 10 aa, synthetic construct
AQATLGTIRV

SEQ ID NO: 1796 - protein, 10 aa, synthetic construct
AQAGASDMVH

SEQ ID NO: 1797 - protein, 10 aa, synthetic construct
AQAVSGTVRS

SEQ ID NO: 1798 - protein, 10 aa, synthetic construct
GGTLAVVSLA

SEQ ID NO: 1799 - protein, 10 aa, synthetic construct
AQAYSADVRM

SEQ ID NO: 1800 - protein, 10 aa, synthetic construct
AQAFAMPKGL

SEQ ID NO: 1801 - protein, 10 aa, synthetic construct
AQALVSTSRP

SEQ ID NO: 1802 - protein, 10 aa, synthetic construct
AQASFQQAST

SEQ ID NO: 1803 - protein, 10 aa, synthetic construct
AQAMTGNDRS

SEQ ID NO: 1804 - protein, 10 aa, synthetic construct
AQASTQSPPG

SEQ ID NO: 1805 - protein, 10 aa, synthetic construct
NARSAVESLA

SEQ ID NO: 1806 - protein, 10 aa, synthetic construct
AQITVSHTTA

SEQ ID NO: 1807 - protein, 10 aa, synthetic construct
AQALAGYDKA

SEQ ID NO: 1808 - protein, 10 aa, synthetic construct
AQSTSHDTRA

SEQ ID NO: 1809 - protein, 10 aa, synthetic construct
AQAIQDRTVV

SEQ ID NO: 1810 - protein, 10 aa, synthetic construct
AQSKTTLTLA

SEQ ID NO: 1811 - protein, 10 aa, synthetic construct
AQASMGTVRL

SEQ ID NO: 1812 - protein, 10 aa, synthetic construct
AQHSDTLTRA

SEQ ID NO: 1813 - protein, 10 aa, synthetic construct
AQKEMYTSVA

SEQ ID NO: 1814 - protein, 10 aa, synthetic construct
AQASPSQPLL

SEQ ID NO: 1815 - protein, 10 aa, synthetic construct
AQAYAGTIYS

SEQ ID NO: 1816 - protein, 10 aa, synthetic construct
AQARSLEPVI

SEQ ID NO: 1817 - protein, 10 aa, synthetic construct
TQAGVSTAVH

SEQ ID NO: 1818 - protein, 10 aa, synthetic construct
AQNTLSLSLA

SEQ ID NO: 1819 - protein, 10 aa, synthetic construct
AQAYVSSVKM

SEQ ID NO: 1820 - protein, 10 aa, synthetic construct
AQAATSPRLG

SEQ ID NO: 1821 - protein, 10 aa, synthetic construct
GYLTAVQPQA

SEQ ID NO: 1822 - protein, 10 aa, synthetic construct
LNNLAVGMTA

SEQ ID NO: 1823 - protein, 10 aa, synthetic construct
AQTVSVHVRA

SEQ ID NO: 1824 - protein, 10 aa, synthetic construct
AQINGLVTTA

SEQ ID NO: 1825 - protein, 10 aa, synthetic construct
AQAAITTTIS

SEQ ID NO: 1826 - protein, 10 aa, synthetic construct
AQASTFVTTI

SEQ ID NO: 1827 - protein, 10 aa, synthetic construct
AQALYDNVPL

SEQ ID NO: 1828 - protein, 10 aa, synthetic construct
AQAAAGTWKG

SEQ ID NO: 1829 - protein, 10 aa, synthetic construct
AQATTGTLRS

SEQ ID NO: 1830 - protein, 10 aa, synthetic construct
GQYAADSSYA

SEQ ID NO: 1831 - protein, 10 aa, synthetic construct
AQAGIATVRT

SEQ ID NO: 1832 - protein, 10 aa, synthetic construct
AQALGHELRA

SEQ ID NO: 1833 - protein, 10 aa, synthetic construct
AQAREAIPQG

SEQ ID NO: 1834 - protein, 10 aa, synthetic construct
AQAMSGTLRM

SEQ ID NO: 1835 - protein, 10 aa, synthetic construct
AQAVDRVRPP

SEQ ID NO: 1836 - protein, 10 aa, synthetic construct
AQAPVNNDRG

SEQ ID NO: 1837 - protein, 10 aa, synthetic construct
AQAQQVAGTM

SEQ ID NO: 1838 - protein, 10 aa, synthetic construct
AQAEPRDTRA

SEQ ID NO: 1839 - protein, 10 aa, synthetic construct
AQRLSEQGVA

SEQ ID NO: 1840 - protein, 10 aa, synthetic construct
AQASEGIQLS

SEQ ID NO: 1841 - protein, 10 aa, synthetic construct
AQRQGPDPLA

SEQ ID NO: 1842 - protein, 10 aa, synthetic construct
AQVTLGSAKA

SEQ ID NO: 1843 - protein, 10 aa, synthetic construct
AQAGASLGLA

SEQ ID NO: 1844 - protein, 10 aa, synthetic construct
AQAFTQDERW

SEQ ID NO: 1845 - protein, 10 aa, synthetic construct
AQASQTTVRS

SEQ ID NO: 1846 - protein, 10 aa, synthetic construct
AQARVSSNGV

SEQ ID NO: 1847 - protein, 10 aa, synthetic construct
AQGPLSGLRA

SEQ ID NO: 1848 - protein, 10 aa, synthetic construct
AQAYGGQSLG

SEQ ID NO: 1849 - protein, 10 aa, synthetic construct
AQANLGTVRQ

SEQ ID NO: 1850 - protein, 10 aa, synthetic construct
AQARSDTRGL

SEQ ID NO: 1851 - protein, 10 aa, synthetic construct
AQAGSDGPRL

SEQ ID NO: 1852 - protein, 10 aa, synthetic construct
TDGAAVVMRA

SEQ ID NO: 1853 - protein, 10 aa, synthetic construct
SGITAVPLHA

SEQ ID NO: 1854 - protein, 10 aa, synthetic construct
AQAAAVGHLP

SEQ ID NO: 1855 - protein, 10 aa, synthetic construct
AQRVEPKWIA

SEQ ID NO: 1856 - protein, 10 aa, synthetic construct
AQAVASSPYA

SEQ ID NO: 1857 - protein, 10 aa, synthetic construct
TQYGAVEGQD

SEQ ID NO: 1858 - protein, 10 aa, synthetic construct
AQAKSHTLEG

SEQ ID NO: 1859 - protein, 10 aa, synthetic construct
AQTHLQIVVA

SEQ ID NO: 1860 - protein, 10 aa, synthetic construct
AQKNEHGMLA

SEQ ID NO: 1861 - protein, 10 aa, synthetic construct
AQITVSHTRA

SEQ ID NO: 1862 - protein, 10 aa, synthetic construct
AQARLAPKGL

SEQ ID NO: 1863 - protein, 10 aa, synthetic construct
KTPGAVSTTA

SEQ ID NO: 1864 - protein, 10 aa, synthetic construct
AQAFSGTIKS

SEQ ID NO: 1865 - protein, 10 aa, synthetic construct
PLNGAVNLYA

SEQ ID NO: 1866 - protein, 10 aa, synthetic construct
AQALTQDERC

SEQ ID NO: 1867 - protein, 10 aa, synthetic construct
AQATAQVQRS

SEQ ID NO: 1868 - protein, 10 aa, synthetic construct
AQTPALINLA

SEQ ID NO: 1869 - protein, 10 aa, synthetic construct
AQASDRSPLL

SEQ ID NO: 1870 - protein, 10 aa, synthetic construct
AQITVSHTMA

SEQ ID NO: 1871 - protein, 10 aa, synthetic construct
AQATGTHLMG

SEQ ID NO: 1872 - protein, 10 aa, synthetic construct
LDGGAVVVTA

SEQ ID NO: 1873 - protein, 10 aa, synthetic construct
LTNGAVRDRA

SEQ ID NO: 1874 - protein, 10 aa, synthetic construct
AQARGSDLRD

SEQ ID NO: 1875 - protein, 10 aa, synthetic construct
AQATFGTQRI

SEQ ID NO: 1876 - protein, 10 aa, synthetic construct
AQALPQTNRP

SEQ ID NO: 1877 - protein, 10 aa, synthetic construct
AQARSNDPVL

SEQ ID NO: 1878 - protein, 10 aa, synthetic construct
AQAYLAVQNG

SEQ ID NO: 1879 - protein, 10 aa, synthetic construct
AQATQSTLRP

SEQ ID NO: 1880 - protein, 10 aa, synthetic construct
AQALGGFGPQ

SEQ ID NO: 1881 - protein, 10 aa, synthetic construct
LVGQAVGSRA

SEQ ID NO: 1882 - protein, 10 aa, synthetic construct
AQSIANVVVA

SEQ ID NO: 1883 - protein, 10 aa, synthetic construct
AQASPSVSRP

SEQ ID NO: 1884 - protein, 10 aa, synthetic construct
AQTVVVSTTA

SEQ ID NO: 1885 - protein, 10 aa, synthetic construct
VKEQAVSVMA

SEQ ID NO: 1886 - protein, 10 aa, synthetic construct
AQQATGTFRA

SEQ ID NO: 1887 - protein, 10 aa, synthetic construct
AQAQGSSSGG

SEQ ID NO: 1888 - protein, 10 aa, synthetic construct
AQAHAVGPQG

SEQ ID NO: 1889 - protein, 10 aa, synthetic construct
AQRLETKETA

SEQ ID NO: 1890 - protein, 10 aa, synthetic construct
AQLAQGIGVA

SEQ ID NO: 1891 - protein, 10 aa, synthetic construct
AQAVQSSFTI

SEQ ID NO: 1892 - protein, 10 aa, synthetic construct
AQATYTASEY

SEQ ID NO: 1893 - protein, 10 aa, synthetic construct
AQTSSQNLKA

SEQ ID NO: 1894 - protein, 10 aa, synthetic construct
AQLVPSVAMA

SEQ ID NO: 1895 - protein, 10 aa, synthetic construct
AQASPSAFAG

SEQ ID NO: 1896 - protein, 10 aa, synthetic construct
AQALALVSAS

SEQ ID NO: 1897 - protein, 10 aa, synthetic construct
AQASVGTTYT

SEQ ID NO: 1898 - protein, 10 aa, synthetic construct
AQARVSSSGT

SEQ ID NO: 1899 - protein, 10 aa, synthetic construct
NSMGAVLGAA

SEQ ID NO: 1900 - protein, 10 aa, synthetic construct
AQHTDTLTRA

SEQ ID NO: 1901 - protein, 10 aa, synthetic construct
AQPNLQPRGA

SEQ ID NO: 1902 - protein, 10 aa, synthetic construct
AQADRHSSIV

SEQ ID NO: 1903 - protein, 10 aa, synthetic construct
SPSVAVPSQA

SEQ ID NO: 1904 - protein, 10 aa, synthetic construct
AQPGIVSTIA

SEQ ID NO: 1905 - protein, 10 aa, synthetic construct
AQAQHSVGLP

SEQ ID NO: 1906 - protein, 10 aa, synthetic construct
AQTNSGAILA

SEQ ID NO: 1907 - protein, 10 aa, synthetic construct
AQDSYDVGRA

SEQ ID NO: 1908 - protein, 10 aa, synthetic construct
EQAQGSSSVG

SEQ ID NO: 1909 - protein, 10 aa, synthetic construct
AQAGVSTAVQ

SEQ ID NO: 1910 - protein, 10 aa, synthetic construct
AQARDMLPLQ

SEQ ID NO: 1911 - protein, 10 aa, synthetic construct
AQAMVGTLRG

SEQ ID NO: 1912 - protein, 10 aa, synthetic construct
AQPNVVSTLA

SEQ ID NO: 1913 - protein, 10 aa, synthetic construct
AQAGHVVTSD

SEQ ID NO: 1914 - protein, 10 aa, synthetic construct
AQAYTTDERM

SEQ ID NO: 1915 - protein, 10 aa, synthetic construct
TAVSAVQVMA

SEQ ID NO: 1916 - protein, 10 aa, synthetic construct
AQAAAGTLRV

SEQ ID NO: 1917 - protein, 10 aa, synthetic construct
VSNEAVHARA

SEQ ID NO: 1918 - protein, 10 aa, synthetic construct
AQVLPQSLSA

SEQ ID NO: 1919 - protein, 10 aa, synthetic construct
AQASVSTLRM

SEQ ID NO: 1920 - protein, 10 aa, synthetic construct
AQAGLLLSVA

SEQ ID NO: 1921 - protein, 10 aa, synthetic construct
AQANLVTGPL

SEQ ID NO: 1922 - protein, 10 aa, synthetic construct
AQASQHSSMA

SEQ ID NO: 1923 - protein, 10 aa, synthetic construct
GYSSAVSSVA

SEQ ID NO: 1924 - protein, 10 aa, synthetic construct
AQVGVSPAVA

SEQ ID NO: 1925 - protein, 10 aa, synthetic construct
DGTLAVPFKA

SEQ ID NO: 1926 - protein, 10 aa, synthetic construct
AQAPPTSTAM

SEQ ID NO: 1927 - protein, 10 aa, synthetic construct
AQATPANVRG

SEQ ID NO: 1928 - protein, 10 aa, synthetic construct
AQAGSSNFLS

SEQ ID NO: 1929 - protein, 10 aa, synthetic construct
AQLLAQDIRA

SEQ ID NO: 1930 - protein, 10 aa, synthetic construct
AQPSSDGYRA

SEQ ID NO: 1931 - protein, 10 aa, synthetic construct
AQALIGTLRT

SEQ ID NO: 1932 - protein, 10 aa, synthetic construct
SVHGAVGILA

SEQ ID NO: 1933 - protein, 10 aa, synthetic construct
AQPYVVSGAA

SEQ ID NO: 1934 - protein, 10 aa, synthetic construct
AQWTHNITAA

SEQ ID NO: 1935 - protein, 10 aa, synthetic construct
PTNAAVRTNA

SEQ ID NO: 1936 - protein, 10 aa, synthetic construct
AHAYSTDVRM

SEQ ID NO: 1937 - protein, 10 aa, synthetic construct
PLAAAVGMKA

SEQ ID NO: 1938 - protein, 10 aa, synthetic construct
AQARDNSVML

SEQ ID NO: 1939 - protein, 10 aa, synthetic construct
AQAQFPRNGG

SEQ ID NO: 1940 - protein, 10 aa, synthetic construct
GALNAVNGVA

SEQ ID NO: 1941 - protein, 10 aa, synthetic construct
AQASHQQGVP

SEQ ID NO: 1942 - protein, 10 aa, synthetic construct
SYQSAVVPQA

SEQ ID NO: 1943 - protein, 10 aa, synthetic construct
AQSIMGTIRA

SEQ ID NO: 1944 - protein, 10 aa, synthetic construct
AQAYVSQAQG

SEQ ID NO: 1945 - protein, 10 aa, synthetic construct
AQATGNQAHF

SEQ ID NO: 1946 - protein, 10 aa, synthetic construct
AQVTVGTPIA

SEQ ID NO: 1947 - protein, 10 aa, synthetic construct
AQAQTSTFRG

SEQ ID NO: 1948 - protein, 10 aa, synthetic construct
SVHMAVTVSA

SEQ ID NO: 1949 - protein, 10 aa, synthetic construct
AQAQSTLNLG

SEQ ID NO: 1950 - protein, 10 aa, synthetic construct
AQDQTGPPLK

SEQ ID NO: 1951 - protein, 10 aa, synthetic construct
HLAHAVSTAA

SEQ ID NO: 1952 - protein, 10 aa, synthetic construct
AQALARDSSF

SEQ ID NO: 1953 - protein, 10 aa, synthetic construct
AQLLSGTLKA

SEQ ID NO: 1954 - protein, 10 aa, synthetic construct
AQASLLPTPG

SEQ ID NO: 1955 - protein, 10 aa, synthetic construct
AQPMAGQSTA

SEQ ID NO: 1956 - protein, 10 aa, synthetic construct
AQARSLEPDI

SEQ ID NO: 1957 - protein, 10 aa, synthetic construct
AQFVTGNQDA

SEQ ID NO: 1958 - protein, 10 aa, synthetic construct
AQATFKTSVP

SEQ ID NO: 1959 - protein, 10 aa, synthetic construct
LNARAVEGPA

SEQ ID NO: 1960 - protein, 10 aa, synthetic construct
AQALPNSGRP

SEQ ID NO: 1961 - protein, 10 aa, synthetic construct
AQALNGSPEA

SEQ ID NO: 1962 - protein, 10 aa, synthetic construct
AQATSLHPLP

SEQ ID NO: 1963 - protein, 10 aa, synthetic construct
AQAVQPPLKN

SEQ ID NO: 1964 - protein, 10 aa, synthetic construct
AQAMLSGTRI

SEQ ID NO: 1965 - protein, 10 aa, synthetic construct
AQHVDLASKA

SEQ ID NO: 1966 - protein, 10 aa, synthetic construct
AQASFATMRP

SEQ ID NO: 1967 - protein, 10 aa, synthetic construct
AQAMPLNARS

SEQ ID NO: 1968 - protein, 10 aa, synthetic construct
AQALVGQMRG

SEQ ID NO: 1969 - protein, 10 aa, synthetic construct
VVNGAVLHLA

SEQ ID NO: 1970 - protein, 10 aa, synthetic construct
AQAQTAPPLK

SEQ ID NO: 1971 - protein, 10 aa, synthetic construct
AQGHGDLHRA

SEQ ID NO: 1972 - protein, 10 aa, synthetic construct
AQAADRSPVH

SEQ ID NO: 1973 - protein, 10 aa, synthetic construct
GALNAVTGVA

SEQ ID NO: 1974 - protein, 10 aa, synthetic construct
AQAERMASLG

SEQ ID NO: 1975 - protein, 10 aa, synthetic construct
AQAPPTTTRL

SEQ ID NO: 1976 - protein, 10 aa, synthetic construct
AQAAVGQTLA

SEQ ID NO: 1977 - protein, 10 aa, synthetic construct
AQSLGTGMHA

SEQ ID NO: 1978 - protein, 10 aa, synthetic construct
AQSLGSPALA

SEQ ID NO: 1979 - protein, 10 aa, synthetic construct
AQASVSVTRP

SEQ ID NO: 1980 - protein, 10 aa, synthetic construct
AQATMSHTMA

SEQ ID NO: 1981 - protein, 10 aa, synthetic construct
AQAVQSLTVG

SEQ ID NO: 1982 - protein, 10 aa, synthetic construct
AQSQTGTYRA

SEQ ID NO: 1983 - protein, 10 aa, synthetic construct
AQSLASVYAA

SEQ ID NO: 1984 - protein, 10 aa, synthetic construct
STKLAVHEQA

SEQ ID NO: 1985 - protein, 10 aa, synthetic construct
AQSHLFPTPA

SEQ ID NO: 1986 - protein, 10 aa, synthetic construct
AQGTWSSSEA

SEQ ID NO: 1987 - protein, 10 aa, synthetic construct
AQTPQGLTKA

SEQ ID NO: 1988 - protein, 10 aa, synthetic construct
AQVSLGTQYA

SEQ ID NO: 1989 - protein, 10 aa, synthetic construct
AQDSRLPTPG

SEQ ID NO: 1990 - protein, 10 aa, synthetic construct
ASIQAVGVKA

SEQ ID NO: 1991 - protein, 10 aa, synthetic construct
AQATMSEQRL

SEQ ID NO: 1992 - protein, 10 aa, synthetic construct
TAQAAVQGMA

SEQ ID NO: 1993 - protein, 10 aa, synthetic construct
AQAFNAAERM

SEQ ID NO: 1994 - protein, 10 aa, synthetic construct
AQINFLSGVA

SEQ ID NO: 1995 - protein, 10 aa, synthetic construct
PQHLAVSSEA

SEQ ID NO: 1996 - protein, 10 aa, synthetic construct
AQALGNFPAV

SEQ ID NO: 1997 - protein, 10 aa, synthetic construct
AQANASTVRV

SEQ ID NO: 1998 - protein, 10 aa, synthetic construct
AQRIVDLTTA

SEQ ID NO: 1999 - protein, 10 aa, synthetic construct
VRQVAVEGVA

SEQ ID NO: 2000 - protein, 10 aa, synthetic construct
AQAPASSQKL

SEQ ID NO: 2001 - protein, 10 aa, synthetic construct
AQQIDSMRPA

SEQ ID NO: 2002 - protein, 10 aa, synthetic construct
AQAHGTSSLF

SEQ ID NO: 2003 - protein, 10 aa, synthetic construct
AQVNSGIALA

SEQ ID NO: 2004 - protein, 10 aa, synthetic construct
AQLHLAETRA

SEQ ID NO: 2005 - protein, 10 aa, synthetic construct
AQALTHDERW

SEQ ID NO: 2006 - protein, 10 aa, synthetic construct
NTVRAVIMEA

SEQ ID NO: 2007 - protein, 10 aa, synthetic construct
AQAYVAGSRP

SEQ ID NO: 2008 - protein, 10 aa, synthetic construct
AQDRAFVVSA

SEQ ID NO: 2009 - protein, 10 aa, synthetic construct
AQAQEKQVFS

SEQ ID NO: 2010 - protein, 10 aa, synthetic construct
AQACVSTAVH

SEQ ID NO: 2011 - protein, 10 aa, synthetic construct
AQAFTHDSRG

SEQ ID NO: 2012 - protein, 10 aa, synthetic construct
AQASHQGTVG

SEQ ID NO: 2013 - protein, 10 aa, synthetic construct
AQAVLVTEQG

SEQ ID NO: 2014 - protein, 10 aa, synthetic construct
AQAVVSTAVH

SEQ ID NO: 2015 - protein, 10 aa, synthetic construct
AQATSRETKG

SEQ ID NO: 2016 - protein, 10 aa, synthetic construct
YQQPAVSSRA

SEQ ID NO: 2017 - protein, 10 aa, synthetic construct
AQANMGLSLS

SEQ ID NO: 2018 - protein, 10 aa, synthetic construct
AQWTSSMSEA

SEQ ID NO: 2019 - protein, 10 aa, synthetic construct
AQASISIMST

SEQ ID NO: 2020 - protein, 10 aa, synthetic construct
AQASVAPLTC

SEQ ID NO: 2021 - protein, 10 aa, synthetic construct
AQLVTVEKQA

SEQ ID NO: 2022 - protein, 10 aa, synthetic construct
AQAATAGEKL

SEQ ID NO: 2023 - protein, 10 aa, synthetic construct
AQALSHGPGG

SEQ ID NO: 2024 - protein, 10 aa, synthetic construct
AQSNAHIEIA

SEQ ID NO: 2025 - protein, 10 aa, synthetic construct
AQARSSSTGI

SEQ ID NO: 2026 - protein, 10 aa, synthetic construct
AQAVGGDVTR

SEQ ID NO: 2027 - protein, 10 aa, synthetic construct
AQAPRTVYQG

SEQ ID NO: 2028 - protein, 10 aa, synthetic construct
AQALHNLGPA

SEQ ID NO: 2029 - protein, 10 aa, synthetic construct
VRMGAVSDNA

SEQ ID NO: 2030 - protein, 10 aa, synthetic construct
AQAFRTSQFT

SEQ ID NO: 2031 - protein, 10 aa, synthetic construct
AQSSATMQRA

SEQ ID NO: 2032 - protein, 10 aa, synthetic construct
AQTLAETYRA

SEQ ID NO: 2033 - protein, 10 aa, synthetic construct
AQANGSIVLN

SEQ ID NO: 2034 - protein, 10 aa, synthetic construct
AQARVADQLP

SEQ ID NO: 2035 - protein, 10 aa, synthetic construct
AQAVKQGLYE

SEQ ID NO: 2036 - protein, 10 aa, synthetic construct
AQAFSDGLKS

SEQ ID NO: 2037 - protein, 10 aa, synthetic construct
AQVSVTPVKA

SEQ ID NO: 2038 - protein, 10 aa, synthetic construct
VNGRAVSMMA

SEQ ID NO: 2039 - protein, 10 aa, synthetic construct
SLVGAVAQMA

SEQ ID NO: 2040 - protein, 10 aa, synthetic construct
AQARVSPVGL

SEQ ID NO: 2041 - protein, 10 aa, synthetic construct
AQSNTTLTLA

SEQ ID NO: 2042 - protein, 10 aa, synthetic construct
AQTSTEHLRA

SEQ ID NO: 2043 - protein, 10 aa, synthetic construct
AQAGMGINLP

SEQ ID NO: 2044 - protein, 10 aa, synthetic construct
AQANAHSLTL

SEQ ID NO: 2045 - protein, 10 aa, synthetic construct
AQARFTTTEM

SEQ ID NO: 2046 - protein, 10 aa, synthetic construct
AQLGYQEVKA

SEQ ID NO: 2047 - protein, 10 aa, synthetic construct
AQAGQHASVF

SEQ ID NO: 2048 - protein, 10 aa, synthetic construct
AQATGSNPRG

SEQ ID NO: 2049 - protein, 10 aa, synthetic construct
AQAPVSPSIP

SEQ ID NO: 2050 - protein, 10 aa, synthetic construct
AQTTLGVGTA

SEQ ID NO: 2051 - protein, 10 aa, synthetic construct
AQASHLVSLA

SEQ ID NO: 2052 - protein, 10 aa, synthetic construct
AQAPLTGLSV

SEQ ID NO: 2053 - protein, 10 aa, synthetic construct
AQVSTSTLRA

SEQ ID NO: 2054 - protein, 10 aa, synthetic construct
AQVQLGTLKA

SEQ ID NO: 2055 - protein, 10 aa, synthetic construct
AQAHVSVSER

SEQ ID NO: 2056 - protein, 10 aa, synthetic construct
AQLLLSGQTA

SEQ ID NO: 2057 - protein, 10 aa, synthetic construct
TTSSAVLTPA

SEQ ID NO: 2058 - protein, 10 aa, synthetic construct
AQFGADTVNA

SEQ ID NO: 2059 - protein, 10 aa, synthetic construct
AQTFSSDNLA

SEQ ID NO: 2060 - protein, 10 aa, synthetic construct
AQIHPANSRA

SEQ ID NO: 2061 - protein, 10 aa, synthetic construct
AQSIGQFPVA

SEQ ID NO: 2062 - protein, 10 aa, synthetic construct
AQVISPENLA

SEQ ID NO: 2063 - protein, 10 aa, synthetic construct
AQALSAISAT

SEQ ID NO: 2064 - protein, 10 aa, synthetic construct
AQAGVSASQM

SEQ ID NO: 2065 - protein, 10 aa, synthetic construct
AQASTKTPLP

SEQ ID NO: 2066 - protein, 10 aa, synthetic construct
AQAPPSTTAM

SEQ ID NO: 2067 - protein, 10 aa, synthetic construct
AQAVSSDRMH

SEQ ID NO: 2068 - protein, 10 aa, synthetic construct
AQAGSVTMRL

SEQ ID NO: 2069 - protein, 10 aa, synthetic construct
AQAVLLGGAV

SEQ ID NO: 2070 - protein, 10 aa, synthetic construct
AQAQRDMVTT

SEQ ID NO: 2071 - protein, 10 aa, synthetic construct
AQAHHGSSLG

SEQ ID NO: 2072 - protein, 10 aa, synthetic construct
VLSSAVGQRA

SEQ ID NO: 2073 - protein, 10 aa, synthetic construct
AQAAGSVLLG

SEQ ID NO: 2074 - protein, 10 aa, synthetic construct
AQAYPTDVRM

SEQ ID NO: 2075 - protein, 10 aa, synthetic construct
AQWSRDAQSA

SEQ ID NO: 2076 - protein, 10 aa, synthetic construct
AQQGLDMGRA

SEQ ID NO: 2077 - protein, 10 aa, synthetic construct
AQAAQNHALV

SEQ ID NO: 2078 - protein, 10 aa, synthetic construct
AQRSQIVEVA

SEQ ID NO: 2079 - protein, 10 aa, synthetic construct
AQMSDVSGRA

SEQ ID NO: 2080 - protein, 10 aa, synthetic construct
AKALTQDERW

SEQ ID NO: 2081 - protein, 10 aa, synthetic construct
AQAVSSSTLT

SEQ ID NO: 2082 - protein, 10 aa, synthetic construct
AQPSRLPTPG

SEQ ID NO: 2083 - protein, 10 aa, synthetic construct
RTSTAVLDFA

SEQ ID NO: 2084 - protein, 10 aa, synthetic construct
AQDLSSSIRA

SEQ ID NO: 2085 - protein, 10 aa, synthetic construct
AQLLDGLTSA

SEQ ID NO: 2086 - protein, 10 aa, synthetic construct
AQALIGLSKP

SEQ ID NO: 2087 - protein, 10 aa, synthetic construct
AQASGTVRPP

SEQ ID NO: 2088 - protein, 10 aa, synthetic construct
AQLLDTRYKA

SEQ ID NO: 2089 - protein, 10 aa, synthetic construct
AQAPNTSFTA

SEQ ID NO: 2090 - protein, 10 aa, synthetic construct
AQTHLQIGVD

SEQ ID NO: 2091 - protein, 10 aa, synthetic construct
AQRLDTSQVA

SEQ ID NO: 2092 - protein, 10 aa, synthetic construct
AQRTQDTLSA

SEQ ID NO: 2093 - protein, 10 aa, synthetic construct
AQADIQSHAL

SEQ ID NO: 2094 - protein, 10 aa, synthetic construct
PNMNAVGIKA

SEQ ID NO: 2095 - protein, 10 aa, synthetic construct
AQAGVSTAVH

SEQ ID NO: 2096 - protein, 10 aa, synthetic construct
AQASGKTFIG

SEQ ID NO: 2097 - protein, 10 aa, synthetic construct
AQAGVQSTRL

SEQ ID NO: 2098 - protein, 10 aa, synthetic construct
AQAQGAYPLV

SEQ ID NO: 2099 - protein, 10 aa, synthetic construct
AQPYSTDVRM

SEQ ID NO: 2100 - protein, 10 aa, synthetic construct
SSSVAVVTLA

SEQ ID NO: 2101 - protein, 10 aa, synthetic construct
AQTYNGLNKA

SEQ ID NO: 2102 - protein, 10 aa, synthetic construct
AQASVSKLRM

SEQ ID NO: 2103 - protein, 10 aa, synthetic construct
AQRGSENEKA

SEQ ID NO: 2104 - protein, 10 aa, synthetic construct
PITNAVLKTA

SEQ ID NO: 2105 - protein, 10 aa, synthetic construct
TNSYAVSSPA

SEQ ID NO: 2106 - protein, 10 aa, synthetic construct
PYQTAVAGAA

SEQ ID NO: 2107 - protein, 10 aa, synthetic construct
GPALAVLGRA

SEQ ID NO: 2108 - protein, 10 aa, synthetic construct
LSISAVPAKA

SEQ ID NO: 2109 - protein, 10 aa, synthetic construct
AQTLGPLPHA

SEQ ID NO: 2110 - protein, 10 aa, synthetic construct
AQAQQPLAHV

SEQ ID NO: 2111 - protein, 10 aa, synthetic construct
AQTDGAWSKA

SEQ ID NO: 2112 - protein, 10 aa, synthetic construct
AQALSGPPSI

SEQ ID NO: 2113 - protein, 10 aa, synthetic construct
AQASSPSTRG

SEQ ID NO: 2114 - protein, 10 aa, synthetic construct
AQASLASNRP

SEQ ID NO: 2115 - protein, 10 aa, synthetic construct
AQNMALSTVA

SEQ ID NO: 2116 - protein, 10 aa, synthetic construct
AQHSDTMTRA

SEQ ID NO: 2117 - protein, 10 aa, synthetic construct
AQAMPRYPPL

SEQ ID NO: 2118 - protein, 10 aa, synthetic construct
AQHIDSMSPA

SEQ ID NO: 2119 - protein, 10 aa, synthetic construct
AQALPGTSRV

SEQ ID NO: 2120 - protein, 10 aa, synthetic construct
AQAKSTQDVQ

SEQ ID NO: 2121 - protein, 10 aa, synthetic construct
AQPLVSASKA

SEQ ID NO: 2122 - protein, 10 aa, synthetic construct
AQAMSGTLRK

SEQ ID NO: 2123 - protein, 10 aa, synthetic construct
AQTLILGAHA

SEQ ID NO: 2124 - protein, 10 aa, synthetic construct
AQAGQARSQG

SEQ ID NO: 2125 - protein, 10 aa, synthetic construct
AQRKDLSLVA

SEQ ID NO: 2126 - protein, 10 aa, synthetic construct
AQALSAPMSL

SEQ ID NO: 2127 - protein, 10 aa, synthetic construct
TNSLAVGMRA

SEQ ID NO: 2128 - protein, 10 aa, synthetic construct
AQAPIGTVRP

SEQ ID NO: 2129 - protein, 10 aa, synthetic construct
FIQAAVSSSA

SEQ ID NO: 2130 - protein, 10 aa, synthetic construct
AQAEKPTHLL

SEQ ID NO: 2131 - protein, 10 aa, synthetic construct
AQALSGDTTR

SEQ ID NO: 2132 - protein, 10 aa, synthetic construct
AQAYIASGGT

SEQ ID NO: 2133 - protein, 10 aa, synthetic construct
QLNQAVGTLA

SEQ ID NO: 2134 - protein, 10 aa, synthetic construct
AQASGALDRP

SEQ ID NO: 2135 - protein, 10 aa, synthetic construct
AQAQDTALRA

SEQ ID NO: 2136 - protein, 10 aa, synthetic construct
AQAQAGMARG

SEQ ID NO: 2137 - protein, 10 aa, synthetic construct
AQAQGSSAVG

SEQ ID NO: 2138 - protein, 10 aa, synthetic construct
AQLLRDIGPA

SEQ ID NO: 2139 - protein, 10 aa, synthetic construct
VDRGAVTQMA

SEQ ID NO: 2140 - protein, 10 aa, synthetic construct
AQAVNVSKGS

SEQ ID NO: 2141 - protein, 10 aa, synthetic construct
SVNTAVESLA

SEQ ID NO: 2142 - protein, 10 aa, synthetic construct
AQARLPHTSS

SEQ ID NO: 2143 - protein, 10 aa, synthetic construct
AQRNGSEVVA

SEQ ID NO: 2144 - protein, 10 aa, synthetic construct
AQATDRVDRP

SEQ ID NO: 2145 - protein, 10 aa, synthetic construct
AQASLSRERT

SEQ ID NO: 2146 - protein, 10 aa, synthetic construct
AQAYSTHVRM

SEQ ID NO: 2147 - protein, 10 aa, synthetic construct
AQHLSAGPTA

SEQ ID NO: 2148 - protein, 10 aa, synthetic construct
LNGGAVSLRA

SEQ ID NO: 2149 - protein, 10 aa, synthetic construct
AQAYGVSSVT

SEQ ID NO: 2150 - protein, 10 aa, synthetic construct
AQFGSAVQLA

SEQ ID NO: 2151 - protein, 10 aa, synthetic construct
AQAPPTSTRL

SEQ ID NO: 2152 - protein, 10 aa, synthetic construct
AQVSTNWPKA

SEQ ID NO: 2153 - protein, 10 aa, synthetic construct
AQTSTDLSRA

SEQ ID NO: 2154 - protein, 10 aa, synthetic construct
AQAHSTDVRM

SEQ ID NO: 2155 - protein, 10 aa, synthetic construct
AQATLTGHVS

SEQ ID NO: 2156 - protein, 10 aa, synthetic construct
AQATTQGALT

SEQ ID NO: 2157 - protein, 10 aa, synthetic construct
AQAAKASDRT

SEQ ID NO: 2158 - protein, 10 aa, synthetic construct
AQGNEHGGRA

SEQ ID NO: 2159 - protein, 10 aa, synthetic construct
AQALSTSLLL

SEQ ID NO: 2160 - protein, 10 aa, synthetic construct
AQASLGSTYL

SEQ ID NO: 2161 - protein, 10 aa, synthetic construct
AQAFSTVGAV

SEQ ID NO: 2162 - protein, 10 aa, synthetic construct
AQLNGLVTTA

SEQ ID NO: 2163 - protein, 10 aa, synthetic construct
AQASVRTLRM

SEQ ID NO: 2164 - protein, 10 aa, synthetic construct
AQATMSRPWQ

SEQ ID NO: 2165 - protein, 10 aa, synthetic construct
AQSSLPAMVA

SEQ ID NO: 2166 - protein, 10 aa, synthetic construct
RETVAVGQYA

SEQ ID NO: 2167 - protein, 10 aa, synthetic construct
AQAFGSEGRS

SEQ ID NO: 2168 - protein, 10 aa, synthetic construct
SSGTAVEHRA

SEQ ID NO: 2169 - protein, 10 aa, synthetic construct
FGTNAVIPRA

SEQ ID NO: 2170 - protein, 10 aa, synthetic construct
AQAGQARSLG

SEQ ID NO: 2171 - protein, 10 aa, synthetic construct
AQSFSSDNMA

SEQ ID NO: 2172 - protein, 10 aa, synthetic construct
AQMNGLTGKA

SEQ ID NO: 2173 - protein, 10 aa, synthetic construct
AQQNGKQHLA

SEQ ID NO: 2174 - protein, 10 aa, synthetic construct
AQHIDSIRPA

SEQ ID NO: 2175 - protein, 10 aa, synthetic construct
AQAADRLSTL

SEQ ID NO: 2176 - protein, 10 aa, synthetic construct
AQFGLKDIRA

SEQ ID NO: 2177 - protein, 10 aa, synthetic construct
AQAHQGGATL

SEQ ID NO: 2178 - protein, 10 aa, synthetic construct
AQATYNSPKP

SEQ ID NO: 2179 - protein, 10 aa, synthetic construct
AQAMSNMLRN

SEQ ID NO: 2180 - protein, 10 aa, synthetic construct
VPISAVMSTA

SEQ ID NO: 2181 - protein, 10 aa, synthetic construct
AQHSLGNTVA

SEQ ID NO: 2182 - protein, 10 aa, synthetic construct
AQATSALSRL

SEQ ID NO: 2183 - protein, 10 aa, synthetic construct
AQADRQTFPV

SEQ ID NO: 2184 - protein, 10 aa, synthetic construct
AQAVNSMSIG

SEQ ID NO: 2185 - protein, 10 aa, synthetic construct
AQALAIVSKN

SEQ ID NO: 2186 - protein, 10 aa, synthetic construct
AQGQLQERFA

SEQ ID NO: 2187 - protein, 10 aa, synthetic construct
AQFNGASAHA

SEQ ID NO: 2188 - protein, 10 aa, synthetic construct
AQLGGQSPVA

SEQ ID NO: 2189 - protein, 10 aa, synthetic construct
AQANGAYTDN

SEQ ID NO: 2190 - protein, 10 aa, synthetic construct
AQNLSSSEPA

SEQ ID NO: 2191 - protein, 10 aa, synthetic construct
AQSAIVLTTA

SEQ ID NO: 2192 - protein, 10 aa, synthetic construct
ITRSAVPDVA

SEQ ID NO: 2193 - protein, 10 aa, synthetic construct
GALKAVTGVA

SEQ ID NO: 2194 - protein, 10 aa, synthetic construct
AQAVGQDYLR

SEQ ID NO: 2195 - protein, 10 aa, synthetic construct
AQVTLNTPLA

SEQ ID NO: 2196 - protein, 10 aa, synthetic construct
AQALTQDDRW

SEQ ID NO: 2197 - protein, 10 aa, synthetic construct
AQAYSTNVRM

SEQ ID NO: 2198 - protein, 10 aa, synthetic construct
AQAVAAPASL

SEQ ID NO: 2199 - protein, 10 aa, synthetic construct
AQANPVSIMS

SEQ ID NO: 2200 - protein, 10 aa, synthetic construct
AQASMQAVKD

SEQ ID NO: 2201 - protein, 10 aa, synthetic construct
AQAVGGHSVA

SEQ ID NO: 2202 - protein, 10 aa, synthetic construct
AQAVAASTRL

SEQ ID NO: 2203 - protein, 10 aa, synthetic construct
GGTHAVSSFA

SEQ ID NO: 2204 - protein, 10 aa, synthetic construct
AQAADSSGFR

SEQ ID NO: 2205 - protein, 10 aa, synthetic construct
AQQSHVPQTA

SEQ ID NO: 2206 - protein, 10 aa, synthetic construct
AQARVGNTNV

SEQ ID NO: 2207 - protein, 10 aa, synthetic construct
AQTVSYSDLA

SEQ ID NO: 2208 - protein, 10 aa, synthetic construct
AQAEHGLARS

SEQ ID NO: 2209 - protein, 10 aa, synthetic construct
AQASNYPVAA

SEQ ID NO: 2210 - protein, 10 aa, synthetic construct
VLLSAVGMAA

SEQ ID NO: 2211 - protein, 10 aa, synthetic construct
AQALSGQNRG

SEQ ID NO: 2212 - protein, 10 aa, synthetic construct
AQAWGQETRQ

SEQ ID NO: 2213 - protein, 10 aa, synthetic construct
AQGYSTDVRM

SEQ ID NO: 2214 - protein, 10 aa, synthetic construct
AQAGSVMSRE

SEQ ID NO: 2215 - protein, 10 aa, synthetic construct
AQAGSLSARG

SEQ ID NO: 2216 - protein, 10 aa, synthetic construct
AQATALAPKS

SEQ ID NO: 2217 - protein, 10 aa, synthetic construct
AQAIRQNGSS

SEQ ID NO: 2218 - protein, 10 aa, synthetic construct
AQLQDNLQLA

SEQ ID NO: 2219 - protein, 10 aa, synthetic construct
AKAYSTDVRM

SEQ ID NO: 2220 - protein, 10 aa, synthetic construct
AQSVDRTLLA

SEQ ID NO: 2221 - protein, 10 aa, synthetic construct
AQAGQNSRLP

SEQ ID NO: 2222 - protein, 10 aa, synthetic construct
AQTNLQPRGA

SEQ ID NO: 2223 - protein, 10 aa, synthetic construct
PNTIAVGQRA

SEQ ID NO: 2224 - protein, 10 aa, synthetic construct
AQAHATLSLS

SEQ ID NO: 2225 - protein, 10 aa, synthetic construct
NHLRAVGSPA

SEQ ID NO: 2226 - protein, 10 aa, synthetic construct
AQETDRNLRA

SEQ ID NO: 2227 - protein, 10 aa, synthetic construct
AQARAETSGS

SEQ ID NO: 2228 - protein, 10 aa, synthetic construct
AQHRELDSYA

SEQ ID NO: 2229 - protein, 10 aa, synthetic construct
AQRHTSDVLA

SEQ ID NO: 2230 - protein, 10 aa, synthetic construct
AQVGQTSSWA

SEQ ID NO: 2231 - protein, 10 aa, synthetic construct
AQANSAALLM

SEQ ID NO: 2232 - protein, 10 aa, synthetic construct
AQAIIERTAT

SEQ ID NO: 2233 - protein, 10 aa, synthetic construct
AQSSRYEEKA

SEQ ID NO: 2234 - protein, 10 aa, synthetic construct
QATGAVNPRA

SEQ ID NO: 2235 - protein, 10 aa, synthetic construct
AQASYSVSVG

SEQ ID NO: 2236 - protein, 10 aa, synthetic construct
AQQGHTVNNA

SEQ ID NO: 2237 - protein, 10 aa, synthetic construct
AQASLPISTR

SEQ ID NO: 2238 - protein, 10 aa, synthetic construct
AQHIDSMRPT

SEQ ID NO: 2239 - protein, 10 aa, synthetic construct
AQAQDTENMR

SEQ ID NO: 2240 - protein, 10 aa, synthetic construct
RTGAAVTGAA

SEQ ID NO: 2241 - protein, 10 aa, synthetic construct
AQASSVRGMG

SEQ ID NO: 2242 - protein, 10 aa, synthetic construct
AQPGIESTIA

SEQ ID NO: 2243 - protein, 10 aa, synthetic construct
AQHVDLDSKA

SEQ ID NO: 2244 - protein, 10 aa, synthetic construct
AQATTVPALG

SEQ ID NO: 2245 - protein, 10 aa, synthetic construct
AQVNPTPQKA

SEQ ID NO: 2246 - protein, 10 aa, synthetic construct
AQAGYISSAS

SEQ ID NO: 2247 - protein, 10 aa, synthetic construct
AQTLILGDPA

SEQ ID NO: 2248 - protein, 10 aa, synthetic construct
AQAASGLTMM

SEQ ID NO: 2249 - protein, 10 aa, synthetic construct
AQALERPPSG

SEQ ID NO: 2250 - protein, 10 aa, synthetic construct
TTYDAVHSKA

SEQ ID NO: 2251 - protein, 10 aa, synthetic construct
AQAMLDSANG

SEQ ID NO: 2252 - protein, 10 aa, synthetic construct
AQAMHQTDKF

SEQ ID NO: 2253 - protein, 10 aa, synthetic construct
KSTVAVQSVA

SEQ ID NO: 2254 - protein, 10 aa, synthetic construct
AQATAGTLIG

SEQ ID NO: 2255 - protein, 10 aa, synthetic construct
GLKSAVTHVA

SEQ ID NO: 2256 - protein, 10 aa, synthetic construct
AQAHSAYQGA

SEQ ID NO: 2257 - protein, 10 aa, synthetic construct
AQSFSSDNLA

SEQ ID NO: 2258 - protein, 10 aa, synthetic construct
AQLNMAASVA

SEQ ID NO: 2259 - protein, 10 aa, synthetic construct
AQFSQAYNAA

SEQ ID NO: 2260 - protein, 10 aa, synthetic construct
AQHLTAGLRA

SEQ ID NO: 2261 - protein, 10 aa, synthetic construct
AQAHTVSPHL

SEQ ID NO: 2262 - protein, 10 aa, synthetic construct
GILGAVLPRA

SEQ ID NO: 2263 - protein, 10 aa, synthetic construct
AQHNSSSLLA

SEQ ID NO: 2264 - protein, 10 aa, synthetic construct
AQAPQVAGTM

SEQ ID NO: 2265 - protein, 10 aa, synthetic construct
AQHQDSRPMA

SEQ ID NO: 2266 - protein, 10 aa, synthetic construct
AQRFQETGLA

SEQ ID NO: 2267 - protein, 10 aa, synthetic construct
AQLTVSHTRA

SEQ ID NO: 2268 - protein, 10 aa, synthetic construct
AQANLRTTMG

SEQ ID NO: 2269 - protein, 10 aa, synthetic construct
AQAGLRDPRM

SEQ ID NO: 2270 - protein, 10 aa, synthetic construct
AQHLLHGTAA

SEQ ID NO: 2271 - protein, 10 aa, synthetic construct
RNQGAVASLA

SEQ ID NO: 2272 - protein, 10 aa, synthetic construct
AQAGSSSVTW

SEQ ID NO: 2273 - protein, 10 aa, synthetic construct
AQPHLQIGVA

SEQ ID NO: 2274 - protein, 10 aa, synthetic construct
AQANSGAVLA

SEQ ID NO: 2275 - protein, 10 aa, synthetic construct
AQLLGDAVKA

SEQ ID NO: 2276 - protein, 10 aa, synthetic construct
SSGNAVSSLA

SEQ ID NO: 2277 - protein, 10 aa, synthetic construct
AQVSVTMALA

SEQ ID NO: 2278 - protein, 10 aa, synthetic construct
AQYHTRGFAA

SEQ ID NO: 2279 - protein, 10 aa, synthetic construct
AQSTTKGTLA

SEQ ID NO: 2280 - protein, 10 aa, synthetic construct
AQAQPPSARY

SEQ ID NO: 2281 - protein, 10 aa, synthetic construct
AQAGLQGTAA

SEQ ID NO: 2282 - protein, 10 aa, synthetic construct
AQPQGSSTFA

SEQ ID NO: 2283 - protein, 10 aa, synthetic construct
TQYRAVEGQA

SEQ ID NO: 2284 - protein, 10 aa, synthetic construct
AQAISTQLAG

SEQ ID NO: 2285 - protein, 10 aa, synthetic construct
AQLGSNISHA

SEQ ID NO: 2286 - protein, 10 aa, synthetic construct
AQTGLSGTVA

SEQ ID NO: 2287 - protein, 10 aa, synthetic construct
AQRVDSSGRA

SEQ ID NO: 2288 - protein, 10 aa, synthetic construct
AQAGLALNPN

SEQ ID NO: 2289 - protein, 10 aa, synthetic construct
AQFYSDNSLA

SEQ ID NO: 2290 - protein, 10 aa, synthetic construct
AQAVGAPQRL

SEQ ID NO: 2291 - protein, 10 aa, synthetic construct
AQASYDDGRA

SEQ ID NO: 2292 - protein, 10 aa, synthetic construct
SSFAAVATAA

SEQ ID NO: 2293 - protein, 10 aa, synthetic construct
AQSTLSMPLA

SEQ ID NO: 2294 - protein, 10 aa, synthetic construct
AQASLHAPRP

SEQ ID NO: 2295 - protein, 10 aa, synthetic construct
HAVAAVSYPA

SEQ ID NO: 2296 - protein, 10 aa, synthetic construct
AQTSPVMVQA

SEQ ID NO: 2297 - protein, 10 aa, synthetic construct
AQADITSTIS

SEQ ID NO: 2298 - protein, 10 aa, synthetic construct
AQAAGVAMLY

SEQ ID NO: 2299 - protein, 10 aa, synthetic construct
AQASVSTLRK

SEQ ID NO: 2300 - protein, 10 aa, synthetic construct
MDLKAVSSRA

SEQ ID NO: 2301 - protein, 10 aa, synthetic construct
AQASLSTLRM

SEQ ID NO: 2302 - protein, 10 aa, synthetic construct
AQPRSPLPMA

SEQ ID NO: 2303 - protein, 10 aa, synthetic construct
GQYADVSSYA

SEQ ID NO: 2304 - protein, 10 aa, synthetic construct
LVGGAVVVPA

SEQ ID NO: 2305 - protein, 10 aa, synthetic construct
AQAQSARPLA

SEQ ID NO: 2306 - protein, 10 aa, synthetic construct
AQSLHPSTTA

SEQ ID NO: 2307 - protein, 10 aa, synthetic construct
AQFQTDLSRA

SEQ ID NO: 2308 - protein, 10 aa, synthetic construct
RTELAVGLSA

SEQ ID NO: 2309 - protein, 10 aa, synthetic construct
AQVVDNSPLA

SEQ ID NO: 2310 - protein, 10 aa, synthetic construct
AQAVSSDSMH

SEQ ID NO: 2311 - protein, 10 aa, synthetic construct
AQASPALHTL

SEQ ID NO: 2312 - protein, 10 aa, synthetic construct
GQYAAVASYA

SEQ ID NO: 2313 - protein, 10 aa, synthetic construct
AQLWQSRVDA

SEQ ID NO: 2314 - protein, 10 aa, synthetic construct
GTFSAVQSTA

SEQ ID NO: 2315 - protein, 10 aa, synthetic construct
AQAILSTIEV

SEQ ID NO: 2316 - protein, 10 aa, synthetic construct
AQNVVSTLRA

SEQ ID NO: 2317 - protein, 10 aa, synthetic construct
AQAMLAVSPG

SEQ ID NO: 2318 - protein, 10 aa, synthetic construct
AQATDSLVAR

SEQ ID NO: 2319 - protein, 10 aa, synthetic construct
AQASPQSSHG

SEQ ID NO: 2320 - protein, 10 aa, synthetic construct
AQATPVHDTL

SEQ ID NO: 2321 - protein, 10 aa, synthetic construct
LRSSAVGTAA

SEQ ID NO: 2322 - protein, 10 aa, synthetic construct
MGRGAVLDTA

SEQ ID NO: 2323 - protein, 10 aa, synthetic construct
AQSHLIPTPA

SEQ ID NO: 2324 - protein, 10 aa, synthetic construct
AQAVLKAPIN

SEQ ID NO: 2325 - protein, 10 aa, synthetic construct
AQKIAPAFLA

SEQ ID NO: 2326 - protein, 10 aa, synthetic construct
AGNVAVLPHA

SEQ ID NO: 2327 - protein, 10 aa, synthetic construct
AQSLGTGLHD

SEQ ID NO: 2328 - protein, 10 aa, synthetic construct
AQAHAMSSRP

SEQ ID NO: 2329 - protein, 10 aa, synthetic construct
AQQGKFDMRA

SEQ ID NO: 2330 - protein, 10 aa, synthetic construct
AQALSGDGTR

SEQ ID NO: 2331 - protein, 10 aa, synthetic construct
AQTHLQIAVA

SEQ ID NO: 2332 - protein, 10 aa, synthetic construct
AQRTQGSSWA

SEQ ID NO: 2333 - protein, 10 aa, synthetic construct
AIGSAVDLRA

SEQ ID NO: 2334 - protein, 10 aa, synthetic construct
AQAQLASGTL

SEQ ID NO: 2335 - protein, 10 aa, synthetic construct
AQALVSAGAL

SEQ ID NO: 2336 - protein, 10 aa, synthetic construct
AQATESVPLK

SEQ ID NO: 2337 - protein, 10 aa, synthetic construct
AQVYNSNPKA

SEQ ID NO: 2338 - protein, 10 aa, synthetic construct
AQRTTYPSSA

SEQ ID NO: 2339 - protein, 10 aa, synthetic construct
AQAMFQQAST

SEQ ID NO: 2340 - protein, 10 aa, synthetic construct
AQPDALVIRA

SEQ ID NO: 2341 - protein, 10 aa, synthetic construct
AQARDISMRG

SEQ ID NO: 2342 - protein, 10 aa, synthetic construct
AQMSFGSTLA

SEQ ID NO: 2343 - protein, 10 aa, synthetic construct
RLLSAVDQQA

SEQ ID NO: 2344 - protein, 10 aa, synthetic construct
AQTTRSIENA

SEQ ID NO: 2345 - protein, 10 aa, synthetic construct
AQVSDFSSRA

SEQ ID NO: 2346 - protein, 10 aa, synthetic construct
AQAHSRVNTE

SEQ ID NO: 2347 - protein, 10 aa, synthetic construct
AQAYSTDLRM

SEQ ID NO: 2348 - protein, 10 aa, synthetic construct
AQALNGSAYS

SEQ ID NO: 2349 - protein, 10 aa, synthetic construct
TQYGAVEAQA

SEQ ID NO: 2350 - protein, 10 aa, synthetic construct
AQAHAGTIYS

SEQ ID NO: 2351 - protein, 10 aa, synthetic construct
AQDPHSMRPA

SEQ ID NO: 2352 - protein, 10 aa, synthetic construct
AQASANIHSS

SEQ ID NO: 2353 - protein, 10 aa, synthetic construct
AQASLQAVSM

SEQ ID NO: 2354 - protein, 10 aa, synthetic construct
AQSSHPAMVA

SEQ ID NO: 2355 - protein, 10 aa, synthetic construct
AQANLQPRGA

SEQ ID NO: 2356 - protein, 10 aa, synthetic construct
AQAVGSSPRG

SEQ ID NO: 2357 - protein, 10 aa, synthetic construct
AQTSAPSALA

SEQ ID NO: 2358 - protein, 10 aa, synthetic construct
AQAVQLQNRG

SEQ ID NO: 2359 - protein, 10 aa, synthetic construct
AQAQGSGMVS

SEQ ID NO: 2360 - protein, 10 aa, synthetic construct
AQAYPSSKSG

SEQ ID NO: 2361 - protein, 10 aa, synthetic construct
AQAVSDYGRG

SEQ ID NO: 2362 - protein, 10 aa, synthetic construct
AQMSLGATRA

SEQ ID NO: 2363 - protein, 10 aa, synthetic construct
AQAFLNSASA

SEQ ID NO: 2364 - protein, 10 aa, synthetic construct
AQALPSNARL

SEQ ID NO: 2365 - protein, 10 aa, synthetic construct
AQANVSVRRE

SEQ ID NO: 2366 - protein, 10 aa, synthetic construct
AQAGASVMVH

SEQ ID NO: 2367 - protein, 10 aa, synthetic construct
AQSLAKDQSA

SEQ ID NO: 2368 - protein, 10 aa, synthetic construct
AQILSALSSA

SEQ ID NO: 2369 - protein, 10 aa, synthetic construct
AQSVHLSLAA

SEQ ID NO: 2370 - protein, 10 aa, synthetic construct
AQALSASSFL

SEQ ID NO: 2371 - protein, 10 aa, synthetic construct
AQTSQLNQTA

SEQ ID NO: 2372 - protein, 10 aa, synthetic construct
AQSNLFPTPA

SEQ ID NO: 2373 - protein, 10 aa, synthetic construct
AQAHGRSFDT

SEQ ID NO: 2374 - protein, 10 aa, synthetic construct
AQLGSNTILA

SEQ ID NO: 2375 - protein, 10 aa, synthetic construct
AQASMNSAKA

SEQ ID NO: 2376 - protein, 10 aa, synthetic construct
AQRQAVEQSA

SEQ ID NO: 2377 - protein, 10 aa, synthetic construct
AQASTGTLRH

SEQ ID NO: 2378 - protein, 10 aa, synthetic construct
AQGPTYPNVA

SEQ ID NO: 2379 - protein, 10 aa, synthetic construct
AQAGPTTSKA

SEQ ID NO: 2380 - protein, 10 aa, synthetic construct
AQATTYRGMA

SEQ ID NO: 2381 - protein, 10 aa, synthetic construct
AQVTNRGMPA

SEQ ID NO: 2382 - protein, 10 aa, synthetic construct
AQAISGQAAW

SEQ ID NO: 2383 - protein, 10 aa, synthetic construct
AQAFRGEDKG

SEQ ID NO: 2384 - protein, 10 aa, synthetic construct
AQQSMPRFVA

SEQ ID NO: 2385 - protein, 10 aa, synthetic construct
AQAGVKSTRL

SEQ ID NO: 2386 - protein, 10 aa, synthetic construct
AQATGSILLA

SEQ ID NO: 2387 - protein, 10 aa, synthetic construct
AQASGHSSFS

SEQ ID NO: 2388 - protein, 10 aa, synthetic construct
AQTANDGLRA

SEQ ID NO: 2389 - protein, 10 aa, synthetic construct
AQASQLALLA

SEQ ID NO: 2390 - protein, 10 aa, synthetic construct
AQLVDRVPRA

SEQ ID NO: 2391 - protein, 10 aa, synthetic construct
AQHSNGYVHA

SEQ ID NO: 2392 - protein, 10 aa, synthetic construct
AQAAPSSSDS

SEQ ID NO: 2393 - protein, 10 aa, synthetic construct
AQAMQRSSSA

SEQ ID NO: 2394 - protein, 10 aa, synthetic construct
AQAASGRPTC

SEQ ID NO: 2395 - protein, 10 aa, synthetic construct
AQPRPGDSRA

SEQ ID NO: 2396 - protein, 10 aa, synthetic construct
AQRDRANGIA

SEQ ID NO: 2397 - protein, 10 aa, synthetic construct
AQVLAISLSA

SEQ ID NO: 2398 - protein, 10 aa, synthetic construct
AQAGMRDPRM

SEQ ID NO: 2399 - protein, 10 aa, synthetic construct
AQASSNSSRA

SEQ ID NO: 2400 - protein, 10 aa, synthetic construct
MHRDAVSGVA

SEQ ID NO: 2401 - protein, 10 aa, synthetic construct
AQAEMKNMPP

SEQ ID NO: 2402 - protein, 10 aa, synthetic construct
AQSGSLLASA

SEQ ID NO: 2403 - protein, 10 aa, synthetic construct
AQAFASQSRG

SEQ ID NO: 2404 - protein, 10 aa, synthetic construct
AQALHLPTLQ

SEQ ID NO: 2405 - protein, 10 aa, synthetic construct
AQAKTGGMNT

SEQ ID NO: 2406 - protein, 10 aa, synthetic construct
ISLNAVSGKA

SEQ ID NO: 2407 - protein, 10 aa, synthetic construct
AQGVHGHYVA

SEQ ID NO: 2408 - protein, 10 aa, synthetic construct
AQAYSKDVRM

SEQ ID NO: 2409 - protein, 10 aa, synthetic construct
VPSIAVSSHA

SEQ ID NO: 2410 - protein, 10 aa, synthetic construct
AQSSRHDDLA

SEQ ID NO: 2411 - protein, 10 aa, synthetic construct
AQANGSGSRG

SEQ ID NO: 2412 - protein, 10 aa, synthetic construct
AQVGIADRRA

SEQ ID NO: 2413 - protein, 10 aa, synthetic construct
AQARGMESML

SEQ ID NO: 2414 - protein, 10 aa, synthetic construct
AQAGVSTAGH

SEQ ID NO: 2415 - protein, 10 aa, synthetic construct
AQVSTRNLIA

SEQ ID NO: 2416 - protein, 10 aa, synthetic construct
AQAVPRLTAG

SEQ ID NO: 2417 - protein, 10 aa, synthetic construct
AQRHMELQEA

SEQ ID NO: 2418 - protein, 10 aa, synthetic construct
SQSRAVVWEA

SEQ ID NO: 2419 - protein, 10 aa, synthetic construct
QSHTAVSSLA

SEQ ID NO: 2420 - protein, 10 aa, synthetic construct
AKASVSTLRM

SEQ ID NO: 2421 - protein, 10 aa, synthetic construct
AQASGSSQWA

SEQ ID NO: 2422 - protein, 10 aa, synthetic construct
AQPNAQYMKA

SEQ ID NO: 2423 - protein, 10 aa, synthetic construct
AQAMGTGSSL

SEQ ID NO: 2424 - protein, 10 aa, synthetic construct
AQAFSTSQLT

SEQ ID NO: 2425 - protein, 10 aa, synthetic construct
AQAKDQSQRL

SEQ ID NO: 2426 - protein, 10 aa, synthetic construct
AQVGGNGSRA

SEQ ID NO: 2427 - protein, 10 aa, synthetic construct
AQANGASRAV

SEQ ID NO: 2428 - protein, 10 aa, synthetic construct
QVNKAVLDFA

SEQ ID NO: 2429 - protein, 10 aa, synthetic construct
AQETLSSTRA

SEQ ID NO: 2430 - protein, 10 aa, synthetic construct
GVYGAVHSSA

SEQ ID NO: 2431 - protein, 10 aa, synthetic construct
AQTITIENVA

SEQ ID NO: 2432 - protein, 10 aa, synthetic construct
AQALMKIADG

SEQ ID NO: 2433 - protein, 10 aa, synthetic construct
AQANVSLQAA

SEQ ID NO: 2434 - protein, 10 aa, synthetic construct
AQSTTSHLRA

SEQ ID NO: 2435 - protein, 10 aa, synthetic construct
AQLSNLVSVA

SEQ ID NO: 2436 - protein, 10 aa, synthetic construct
AQANSTPTRQ

SEQ ID NO: 2437 - protein, 10 aa, synthetic construct
AQQRGDRAAA

SEQ ID NO: 2438 - protein, 10 aa, synthetic construct
AQARLGQSVG

SEQ ID NO: 2439 - protein, 10 aa, synthetic construct
AQQLTYGSSA

SEQ ID NO: 2440 - protein, 10 aa, synthetic construct
AQPAEKQYSA

SEQ ID NO: 2441 - protein, 10 aa, synthetic construct
AQAMPRSRGD

SEQ ID NO: 2442 - protein, 10 aa, synthetic construct
AQGLSGRALA

SEQ ID NO: 2443 - protein, 10 aa, synthetic construct
AQARVTAVDA

SEQ ID NO: 2444 - protein, 10 aa, synthetic construct
AQVGVSTAVA

SEQ ID NO: 2445 - protein, 10 aa, synthetic construct
AQTGVTSAQA

SEQ ID NO: 2446 - protein, 10 aa, synthetic construct
AQALVTSSEK

SEQ ID NO: 2447 - protein, 10 aa, synthetic construct
AQASPHSSMA

SEQ ID NO: 2448 - protein, 10 aa, synthetic construct
AQALTQDEMW

SEQ ID NO: 2449 - protein, 10 aa, synthetic construct
AQAFSTQQRL

SEQ ID NO: 2450 - protein, 10 aa, synthetic construct
AQAGSQVTQA

SEQ ID NO: 2451 - protein, 10 aa, synthetic construct
AQQSTLALKA

SEQ ID NO: 2452 - protein, 10 aa, synthetic construct
AQALNGSHAA

SEQ ID NO: 2453 - protein, 10 aa, synthetic construct
AQATEGHLRS

SEQ ID NO: 2454 - protein, 10 aa, synthetic construct
AQPMANMLMA

SEQ ID NO: 2455 - protein, 10 aa, synthetic construct
PSTSAVSQKA

SEQ ID NO: 2456 - protein, 10 aa, synthetic construct
AQAPPSSTEM

SEQ ID NO: 2457 - protein, 10 aa, synthetic construct
AQRERVDLAA

SEQ ID NO: 2458 - protein, 10 aa, synthetic construct
AQASVTLPRT

SEQ ID NO: 2459 - protein, 10 aa, synthetic construct
AQAYPSSSKA

SEQ ID NO: 2460 - protein, 10 aa, synthetic construct
AQAHSGSAIP

SEQ ID NO: 2461 - protein, 10 aa, synthetic construct
AQSPSQSLKA

SEQ ID NO: 2462 - protein, 10 aa, synthetic construct
AQATPPATSP

SEQ ID NO: 2463 - protein, 10 aa, synthetic construct
CLGAAVNQCA

SEQ ID NO: 2464 - protein, 10 aa, synthetic construct
VLGQAVRDKA

SEQ ID NO: 2465 - protein, 10 aa, synthetic construct
AQAQKANNVG

SEQ ID NO: 2466 - protein, 10 aa, synthetic construct
AQTLLPVNGA

SEQ ID NO: 2467 - protein, 10 aa, synthetic construct
AQAHGTIQRG

SEQ ID NO: 2468 - protein, 10 aa, synthetic construct
TVYTAVGVSA

SEQ ID NO: 2469 - protein, 10 aa, synthetic construct
LGRGAVLDMA

SEQ ID NO: 2470 - protein, 10 aa, synthetic construct
AQANVRSDQM

SEQ ID NO: 2471 - protein, 10 aa, synthetic construct
AQARDSQKGW

SEQ ID NO: 2472 - protein, 10 aa, synthetic construct
AQTPGSRSAA

SEQ ID NO: 2473 - protein, 10 aa, synthetic construct
AQALPSNARQ

SEQ ID NO: 2474 - protein, 10 aa, synthetic construct
AQASATSVVH

SEQ ID NO: 2475 - protein, 10 aa, synthetic construct
AQINLGTMRA

SEQ ID NO: 2476 - protein, 10 aa, synthetic construct
AQVYNNTSAA

SEQ ID NO: 2477 - protein, 10 aa, synthetic construct
AQASANLTRG

SEQ ID NO: 2478 - protein, 10 aa, synthetic construct
AQLRTDYTRA

SEQ ID NO: 2479 - protein, 10 aa, synthetic construct
AQAYSTDVKM

SEQ ID NO: 2480 - protein, 10 aa, synthetic construct
AQTSQLYQPA

SEQ ID NO: 2481 - protein, 10 aa, synthetic construct
AQALTQEERW

SEQ ID NO: 2482 - protein, 10 aa, synthetic construct
LPNGAVRDRA

SEQ ID NO: 2483 - protein, 10 aa, synthetic construct
VTGSAVAGIA

SEQ ID NO: 2484 - protein, 10 aa, synthetic construct
AQAFSTDVRM

SEQ ID NO: 2485 - protein, 10 aa, synthetic construct
AQAHGPTSGV

SEQ ID NO: 2486 - protein, 10 aa, synthetic construct
AQAGVGLPIA

SEQ ID NO: 2487 - protein, 10 aa, synthetic construct
AQVNSGQARA

SEQ ID NO: 2488 - protein, 10 aa, synthetic construct
AQAQTGPPMK

SEQ ID NO: 2489 - protein, 10 aa, synthetic construct
AQARLAPVAC

SEQ ID NO: 2490 - protein, 10 aa, synthetic construct
LSIGAVASMA

SEQ ID NO: 2491 - protein, 10 aa, synthetic construct
AQAQDLGVMR

SEQ ID NO: 2492 - protein, 10 aa, synthetic construct
PTGLAVTSPA

SEQ ID NO: 2493 - protein, 10 aa, synthetic construct
AQSASTSWSA

SEQ ID NO: 2494 - protein, 10 aa, synthetic construct
AQNGSNVRNA

SEQ ID NO: 2495 - protein, 10 aa, synthetic construct
AQASISSSAT

SEQ ID NO: 2496 - protein, 10 aa, synthetic construct
AQNSHAHLAA

SEQ ID NO: 2497 - protein, 10 aa, synthetic construct
AQAVGVKQFF

SEQ ID NO: 2498 - protein, 10 aa, synthetic construct
AQAHLSPTHA

SEQ ID NO: 2499 - protein, 10 aa, synthetic construct
AQPAYGSSYA

SEQ ID NO: 2500 - protein, 10 aa, synthetic construct
AQAHQARSGS

SEQ ID NO: 2501 - protein, 10 aa, synthetic construct
AQAHTSPTQR

SEQ ID NO: 2502 - protein, 10 aa, synthetic construct
AQAATPSSSR

SEQ ID NO: 2503 - protein, 10 aa, synthetic construct
AQAHNSYPKV

SEQ ID NO: 2504 - protein, 10 aa, synthetic construct
AQSSLGSSLA

SEQ ID NO: 2505 - protein, 10 aa, synthetic construct
AQALSRSNVG

SEQ ID NO: 2506 - protein, 10 aa, synthetic construct
AQASLSSLSG

SEQ ID NO: 2507 - protein, 10 aa, synthetic construct
AQHGSSEFTA

SEQ ID NO: 2508 - protein, 10 aa, synthetic construct
AQSALVAGVA

SEQ ID NO: 2509 - protein, 10 aa, synthetic construct
AQASSSSLRP

SEQ ID NO: 2510 - protein, 10 aa, synthetic construct
AQTARDTGFA

SEQ ID NO: 2511 - protein, 10 aa, synthetic construct
KSVQAVRDPA

SEQ ID NO: 2512 - protein, 10 aa, synthetic construct
AQAGSHSSVS

SEQ ID NO: 2513 - protein, 10 aa, synthetic construct
VRAHAVTGLA

SEQ ID NO: 2514 - protein, 10 aa, synthetic construct
ASHTAVGEFA

SEQ ID NO: 2515 - protein, 10 aa, synthetic construct
AQIRSEWRDA

SEQ ID NO: 2516 - protein, 10 aa, synthetic construct
AQQLARVSGA

SEQ ID NO: 2517 - protein, 10 aa, synthetic construct
AQAAITSTNS

SEQ ID NO: 2518 - protein, 10 aa, synthetic construct
AQARDAVQLP

SEQ ID NO: 2519 - protein, 10 aa, synthetic construct
AQAKELVSTS

SEQ ID NO: 2520 - protein, 10 aa, synthetic construct
AQGIAETLSA

SEQ ID NO: 2521 - protein, 10 aa, synthetic construct
AQLGSGFSTA

SEQ ID NO: 2522 - protein, 10 aa, synthetic construct
AQNAKELERA

SEQ ID NO: 2523 - protein, 10 aa, synthetic construct
AQTHLQNGVA

SEQ ID NO: 2524 - protein, 10 aa, synthetic construct
SGNLAVGTPA

SEQ ID NO: 2525 - protein, 10 aa, synthetic construct
AQPSPGTSVA

SEQ ID NO: 2526 - protein, 10 aa, synthetic construct
AQSSAAAGRA

SEQ ID NO: 2527 - protein, 10 aa, synthetic construct
AQAGISAAIM

SEQ ID NO: 2528 - protein, 10 aa, synthetic construct
AQALGYHQTG

SEQ ID NO: 2529 - protein, 10 aa, synthetic construct
NAGQAVAARA

SEQ ID NO: 2530 - protein, 10 aa, synthetic construct
AQPFGGSGYA

SEQ ID NO: 2531 - protein, 10 aa, synthetic construct
AQAGSPSRLC

SEQ ID NO: 2532 - protein, 10 aa, synthetic construct
AQARTIGTIA

SEQ ID NO: 2533 - protein, 10 aa, synthetic construct
AQVVSVSSRA

SEQ ID NO: 2534 - protein, 10 aa, synthetic construct
AQAGQARSMG

SEQ ID NO: 2535 - protein, 10 aa, synthetic construct
AQATRGVTAG

SEQ ID NO: 2536 - protein, 10 aa, synthetic construct
AQQSNGYGRA

SEQ ID NO: 2537 - protein, 10 aa, synthetic construct
AQASLAPLKS

SEQ ID NO: 2538 - protein, 10 aa, synthetic construct
AQPGANHNGA

SEQ ID NO: 2539 - protein, 10 aa, synthetic construct
LGRGAVPDTA

SEQ ID NO: 2540 - protein, 10 aa, synthetic construct
AQHFQTASLA

SEQ ID NO: 2541 - protein, 10 aa, synthetic construct
AQAPAGHHTR

SEQ ID NO: 2542 - protein, 10 aa, synthetic construct
AQPSVQNSMA

SEQ ID NO: 2543 - protein, 10 aa, synthetic construct
AQAKLSGHVS

SEQ ID NO: 2544 - protein, 10 aa, synthetic construct
AQFGTSSPSA

SEQ ID NO: 2545 - protein, 10 aa, synthetic construct
AQASHISSVR

SEQ ID NO: 2546 - protein, 10 aa, synthetic construct
AQALSRNGIG

SEQ ID NO: 2547 - protein, 10 aa, synthetic construct
AQASAQVQRS

SEQ ID NO: 2548 - protein, 10 aa, synthetic construct
AQGGPHLQAA

SEQ ID NO: 2549 - protein, 10 aa, synthetic construct
AQAQSDSAFR

SEQ ID NO: 2550 - protein, 10 aa, synthetic construct
AQTYSTDVRM

SEQ ID NO: 2551 - protein, 10 aa, synthetic construct
LARGAVLDTA

SEQ ID NO: 2552 - protein, 10 aa, synthetic construct
AQASPHTLRS

SEQ ID NO: 2553 - protein, 10 aa, synthetic construct
AQHSDTQTRA

SEQ ID NO: 2554 - protein, 10 aa, synthetic construct
AQATPSPSAS

SEQ ID NO: 2555 - protein, 10 aa, synthetic construct
AQNQVTYSKA

SEQ ID NO: 2556 - protein, 10 aa, synthetic construct
AQHTSVVYGA

SEQ ID NO: 2557 - protein, 10 aa, synthetic construct
AQAQVSQMSH

SEQ ID NO: 2558 - protein, 10 aa, synthetic construct
SFLRAVKNDA

SEQ ID NO: 2559 - protein, 10 aa, synthetic construct
AQAYSTDVGM

SEQ ID NO: 2560 - protein, 10 aa, synthetic construct
AKTPALINLA

SEQ ID NO: 2561 - protein, 10 aa, synthetic construct
VSTAAVSSAA

SEQ ID NO: 2562 - protein, 10 aa, synthetic construct
AQAPITSTIS

SEQ ID NO: 2563 - protein, 10 aa, synthetic construct
AQTNLQTRGA

SEQ ID NO: 2564 - protein, 10 aa, synthetic construct
AQATRLPTPG

SEQ ID NO: 2565 - protein, 10 aa, synthetic construct
PQHLAVSSAA

SEQ ID NO: 2566 - protein, 10 aa, synthetic construct
AQASPHPSRP

SEQ ID NO: 2567 - protein, 10 aa, synthetic construct
AQAQPAGQRG

SEQ ID NO: 2568 - protein, 10 aa, synthetic construct
AQPQRQGVQA

SEQ ID NO: 2569 - protein, 10 aa, synthetic construct
AQHVAGSSNA

SEQ ID NO: 2570 - protein, 10 aa, synthetic construct
AQVPIQMGVA

SEQ ID NO: 2571 - protein, 10 aa, synthetic construct
AQATVSVPLK

SEQ ID NO: 2572 - protein, 10 aa, synthetic construct
AQISVSHTRA

SEQ ID NO: 2573 - protein, 10 aa, synthetic construct
SLVGPVAQMA

SEQ ID NO: 2574 - protein, 10 aa, synthetic construct
AQPRLNLTEA

SEQ ID NO: 2575 - protein, 10 aa, synthetic construct
AQASQEYSRL

SEQ ID NO: 2576 - protein, 10 aa, synthetic construct
AQKSLAFDSA

SEQ ID NO: 2577 - protein, 10 aa, synthetic construct
AQALGHSHHC

SEQ ID NO: 2578 - protein, 10 aa, synthetic construct
AQAAQTGRPI

SEQ ID NO: 2579 - protein, 10 aa, synthetic construct
AQASGTSVRQ

SEQ ID NO: 2580 - protein, 10 aa, synthetic construct
AQAMGTASYC

SEQ ID NO: 2581 - protein, 10 aa, synthetic construct
AQISHNHPQA

SEQ ID NO: 2582 - protein, 10 aa, synthetic construct
AQAYSTYVRM

SEQ ID NO: 2583 - protein, 10 aa, synthetic construct
AQVGKLDIRA

SEQ ID NO: 2584 - protein, 10 aa, synthetic construct
AQLKQGGINA

SEQ ID NO: 2585 - protein, 10 aa, synthetic construct
AQASAHFREP

SEQ ID NO: 2586 - protein, 10 aa, synthetic construct
AQALDTVLSA

SEQ ID NO: 2587 - protein, 10 aa, synthetic construct
GAGTAVGNIA

SEQ ID NO: 2588 - protein, 10 aa, synthetic construct
AQANGSATYA

SEQ ID NO: 2589 - protein, 10 aa, synthetic construct
AQTQLAQQKA

SEQ ID NO: 2590 - protein, 10 aa, synthetic construct
AQYVTTVSPA

SEQ ID NO: 2591 - protein, 10 aa, synthetic construct
SQFSAVTVTA

SEQ ID NO: 2592 - protein, 10 aa, synthetic construct
AQAASDSFRY

SEQ ID NO: 2593 - protein, 10 aa, synthetic construct
AQASPASVTR

SEQ ID NO: 2594 - protein, 10 aa, synthetic construct
AQARDSGMFL

SEQ ID NO: 2595 - protein, 10 aa, synthetic construct
AQSKTTLTLS

SEQ ID NO: 2596 - protein, 10 aa, synthetic construct
AQLVQESLSA

SEQ ID NO: 2597 - protein, 10 aa, synthetic construct
AQAALKSLAG

SEQ ID NO: 2598 - protein, 10 aa, synthetic construct
AQAVPNQGQK

SEQ ID NO: 2599 - protein, 10 aa, synthetic construct
AQALSRSSLG

SEQ ID NO: 2600 - protein, 10 aa, synthetic construct
AQAGSVMSRV

SEQ ID NO: 2601 - protein, 10 aa, synthetic construct
AQMATVTPMA

SEQ ID NO: 2602 - protein, 10 aa, synthetic construct
AQARTASGID

SEQ ID NO: 2603 - protein, 10 aa, synthetic construct
SHSSAVSHPA

SEQ ID NO: 2604 - protein, 10 aa, synthetic construct
AQADRMRTTA

SEQ ID NO: 2605 - protein, 10 aa, synthetic construct
AQNAQNRALA

SEQ ID NO: 2606 - protein, 10 aa, synthetic construct
AQAASNAYSS

SEQ ID NO: 2607 - protein, 10 aa, synthetic construct
AQATFQQAST

SEQ ID NO: 2608 - protein, 10 aa, synthetic construct
AQVYTISTPA

SEQ ID NO: 2609 - protein, 10 aa, synthetic construct
AQTVIAVGVA

SEQ ID NO: 2610 - protein, 10 aa, synthetic construct
LARGAVPPTA

SEQ ID NO: 2611 - protein, 10 aa, synthetic construct
AQMLQTSVLA

SEQ ID NO: 2612 - protein, 10 aa, synthetic construct
AQARQVSPLL

SEQ ID NO: 2613 - protein, 10 aa, synthetic construct
AQAGQMSNAR

SEQ ID NO: 2614 - protein, 10 aa, synthetic construct
AQTPALIKLA

SEQ ID NO: 2615 - protein, 10 aa, synthetic construct
AQAYTTDVRK

SEQ ID NO: 2616 - protein, 10 aa, synthetic construct
VVKGAVLHVA

SEQ ID NO: 2617 - protein, 10 aa, synthetic construct
AQDTVSVPLK

SEQ ID NO: 2618 - protein, 10 aa, synthetic construct
AQKGAPSLQA

SEQ ID NO: 2619 - protein, 10 aa, synthetic construct
AQASYDVGRA

SEQ ID NO: 2620 - protein, 10 aa, synthetic construct
AQGPLSGMRA

SEQ ID NO: 2621 - protein, 10 aa, synthetic construct
AQALGTSVPA

SEQ ID NO: 2622 - protein, 10 aa, synthetic construct
AQVNKGASTA

SEQ ID NO: 2623 - protein, 10 aa, synthetic construct
AQLTRTSPVA

SEQ ID NO: 2624 - protein, 10 aa, synthetic construct
AQADAALRFS

SEQ ID NO: 2625 - protein, 10 aa, synthetic construct
AQVQLVVSPA

SEQ ID NO: 2626 - protein, 10 aa, synthetic construct
AQAYSSDVRM

SEQ ID NO: 2627 - protein, 10 aa, synthetic construct
AQARSGLSLP

SEQ ID NO: 2628 - protein, 10 aa, synthetic construct
AQNGHKFTAA

SEQ ID NO: 2629 - protein, 10 aa, synthetic construct
AQGLSSATKA

SEQ ID NO: 2630 - protein, 10 aa, synthetic construct
AQGTWSTVKA

SEQ ID NO: 2631 - protein, 10 aa, synthetic construct
AQASGVGGRI

SEQ ID NO: 2632 - protein, 10 aa, synthetic construct
AQTSYPAQKA

SEQ ID NO: 2633 - protein, 10 aa, synthetic construct
AQNAVPTHSA

SEQ ID NO: 2634 - protein, 10 aa, synthetic construct
AQSYPEITRA

SEQ ID NO: 2635 - protein, 10 aa, synthetic construct
AQTGLSTSSA

SEQ ID NO: 2636 - protein, 10 aa, synthetic construct
AQYDTHNFAA

SEQ ID NO: 2637 - protein, 10 aa, synthetic construct
AQAVLSSVIQ

SEQ ID NO: 2638 - protein, 10 aa, synthetic construct
AQDSAVALMA

SEQ ID NO: 2639 - protein, 10 aa, synthetic construct
AQATGKGALP

SEQ ID NO: 2640 - protein, 10 aa, synthetic construct
AQNSRSGHDA

SEQ ID NO: 2641 - protein, 10 aa, synthetic construct
AQAFQKEPSV

SEQ ID NO: 2642 - protein, 10 aa, synthetic construct
AQAGSTSGKM

SEQ ID NO: 2643 - protein, 10 aa, synthetic construct
AQRDQAHSQA

SEQ ID NO: 2644 - protein, 10 aa, synthetic construct
AQAASALSGR

SEQ ID NO: 2645 - protein, 10 aa, synthetic construct
AQARHSSLLP

SEQ ID NO: 2646 - protein, 10 aa, synthetic construct
AQGPGTSYLA

SEQ ID NO: 2647 - protein, 10 aa, synthetic construct
FLAPAVSSKA

SEQ ID NO: 2648 - protein, 10 aa, synthetic construct
AQAGPQCSSC

SEQ ID NO: 2649 - protein, 10 aa, synthetic construct
AQALTQHERW

SEQ ID NO: 2650 - protein, 10 aa, synthetic construct
AQAIRSSERV

SEQ ID NO: 2651 - protein, 10 aa, synthetic construct
AQAVHSSSVY

SEQ ID NO: 2652 - protein, 10 aa, synthetic construct
AQSSRTALAA

SEQ ID NO: 2653 - protein, 10 aa, synthetic construct
AQITFSHTRA

SEQ ID NO: 2654 - protein, 10 aa, synthetic construct
AQALTLSGGL

SEQ ID NO: 2655 - protein, 10 aa, synthetic construct
AQAGKTLSVL

SEQ ID NO: 2656 - protein, 10 aa, synthetic construct
AQASRSNLDN

SEQ ID NO: 2657 - protein, 10 aa, synthetic construct
AQGSLSTHTA

SEQ ID NO: 2658 - protein, 10 aa, synthetic construct
AQQSVAYNVA

SEQ ID NO: 2659 - protein, 10 aa, synthetic construct
AQHTLRLSSA

SEQ ID NO: 2660 - protein, 10 aa, synthetic construct
AQAGGTPNKL

SEQ ID NO: 2661 - protein, 10 aa, synthetic construct
AQAFQSLTLA

SEQ ID NO: 2662 - protein, 10 aa, synthetic construct
AQAVALSHQE

SEQ ID NO: 2663 - protein, 10 aa, synthetic construct
AQMLASGIPA

SEQ ID NO: 2664 - protein, 10 aa, synthetic construct
AQNRALDSYA

SEQ ID NO: 2665 - protein, 10 aa, synthetic construct
AQASGSTTRN

SEQ ID NO: 2666 - protein, 10 aa, synthetic construct
AQARGDGYVA

SEQ ID NO: 2667 - protein, 10 aa, synthetic construct
DARVAVLDFA

SEQ ID NO: 2668 - protein, 10 aa, synthetic construct
AQAVASQVSR

SEQ ID NO: 2669 - protein, 10 aa, synthetic construct
AQARGPSPAT

SEQ ID NO: 2670 - protein, 10 aa, synthetic construct
AQHRALDSYD

SEQ ID NO: 2671 - protein, 10 aa, synthetic construct
AQLIDSTSRA

SEQ ID NO: 2672 - protein, 10 aa, synthetic construct
AQAQTLSRGS

SEQ ID NO: 2673 - protein, 10 aa, synthetic construct
AQFRSAITSA

SEQ ID NO: 2674 - protein, 10 aa, synthetic construct
AQANMTKQSL

SEQ ID NO: 2675 - protein, 10 aa, synthetic construct
AQNAGSTSRA

SEQ ID NO: 2676 - protein, 10 aa, synthetic construct
VLGSAVTGRA

SEQ ID NO: 2677 - protein, 10 aa, synthetic construct
AQPMLQSSSA

SEQ ID NO: 2678 - protein, 10 aa, synthetic construct
AQLGTPSLSA

SEQ ID NO: 2679 - protein, 10 aa, synthetic construct
AQATAHTGVP

SEQ ID NO: 2680 - protein, 10 aa, synthetic construct
AQAVGRDNRL

SEQ ID NO: 2681 - protein, 10 aa, synthetic construct
AQATSASVWA

SEQ ID NO: 2682 - protein, 10 aa, synthetic construct
AQAGSEASLR

SEQ ID NO: 2683 - protein, 10 aa, synthetic construct
AQANQNRTAF

SEQ ID NO: 2684 - protein, 10 aa, synthetic construct
AQASAQVKRS

SEQ ID NO: 2685 - protein, 10 aa, synthetic construct
AQATSGVHHP

SEQ ID NO: 2686 - protein, 10 aa, synthetic construct
AQTHMQIGVA

SEQ ID NO: 2687 - protein, 10 aa, synthetic construct
AQSHIFPTPA

SEQ ID NO: 2688 - protein, 10 aa, synthetic construct
AQLFHTGSPA

SEQ ID NO: 2689 - protein, 10 aa, synthetic construct
LASRAVVGTA

SEQ ID NO: 2690 - protein, 10 aa, synthetic construct
AQALLRVGVG

SEQ ID NO: 2691 - protein, 10 aa, synthetic construct
AQITLPSGTA

SEQ ID NO: 2692 - protein, 10 aa, synthetic construct
AQAEKSLGRQ

SEQ ID NO: 2693 - protein, 10 aa, synthetic construct
AQTSNTTTRA

SEQ ID NO: 2694 - protein, 10 aa, synthetic construct
AQAHTQASYM

SEQ ID NO: 2695 - protein, 10 aa, synthetic construct
AQERGASSSA

SEQ ID NO: 2696 - protein, 10 aa, synthetic construct
AQATPSSTAM

SEQ ID NO: 2697 - protein, 10 aa, synthetic construct
AQSTVNRTYA

SEQ ID NO: 2698 - protein, 10 aa, synthetic construct
AQAGHGPSTR

SEQ ID NO: 2699 - protein, 10 aa, synthetic construct
AQLSLVPLQA

SEQ ID NO: 2700 - protein, 10 aa, synthetic construct
AQLHSPIPSA

SEQ ID NO: 2701 - protein, 10 aa, synthetic construct
AQSLARDGLA

SEQ ID NO: 2702 - protein, 10 aa, synthetic construct
AQAPPSSPAM

SEQ ID NO: 2703 - protein, 10 aa, synthetic construct
TQYGAVERQA

SEQ ID NO: 2704 - protein, 10 aa, synthetic construct
AQAGQARSLA

SEQ ID NO: 2705 - protein, 10 aa, synthetic construct
AQPVGRVPPA

SEQ ID NO: 2706 - protein, 10 aa, synthetic construct
AQAREQRGPV

SEQ ID NO: 2707 - protein, 10 aa, synthetic construct
AQKTSLLWEA

SEQ ID NO: 2708 - protein, 10 aa, synthetic construct
AQGSGKNLIA

SEQ ID NO: 2709 - protein, 10 aa, synthetic construct
AQASEGHQLS

SEQ ID NO: 2710 - protein, 10 aa, synthetic construct
AQALHAGHHP

SEQ ID NO: 2711 - protein, 10 aa, synthetic construct
AQSKRDDPSA

SEQ ID NO: 2712 - protein, 10 aa, synthetic construct
AQTSRELRMA

SEQ ID NO: 2713 - protein, 10 aa, synthetic construct
AQALPASGAR

SEQ ID NO: 2714 - protein, 10 aa, synthetic construct
AQSNALLSLA

SEQ ID NO: 2715 - protein, 10 aa, synthetic construct
AQASPVVGVS

SEQ ID NO: 2716 - protein, 10 aa, synthetic construct
AQARGDSYMA

SEQ ID NO: 2717 - protein, 10 aa, synthetic construct
AQAGASSLTV

SEQ ID NO: 2718 - protein, 10 aa, synthetic construct
AQALRPVNGT

SEQ ID NO: 2719 - protein, 10 aa, synthetic construct
AQVRSGPTLA

SEQ ID NO: 2720 - protein, 10 aa, synthetic construct
AQFPPLSRSA

SEQ ID NO: 2721 - protein, 10 aa, synthetic construct
AQVARGTVQA

SEQ ID NO: 2722 - protein, 10 aa, synthetic construct
AQTSTQSPPG

SEQ ID NO: 2723 - protein, 10 aa, synthetic construct
AQARDGMNVR

SEQ ID NO: 2724 - protein, 10 aa, synthetic construct
AQAVSRNVVV

SEQ ID NO: 2725 - protein, 10 aa, synthetic construct
AQHTATRSVA

SEQ ID NO: 2726 - protein, 10 aa, synthetic construct
AQAVREDGHA

SEQ ID NO: 2727 - protein, 10 aa, synthetic construct
TNSSAVAASA

SEQ ID NO: 2728 - protein, 10 aa, synthetic construct
AQATFQLAST

SEQ ID NO: 2729 - protein, 10 aa, synthetic construct
AQAHHQQTSL

SEQ ID NO: 2730 - protein, 10 aa, synthetic construct
AQGQHAHMMA

SEQ ID NO: 2731 - protein, 10 aa, synthetic construct
AQATSSLHVL

SEQ ID NO: 2732 - protein, 10 aa, synthetic construct
AQAPNSGLAM

SEQ ID NO: 2733 - protein, 10 aa, synthetic construct
SASRAVLDFA

SEQ ID NO: 2734 - protein, 10 aa, synthetic construct
AQARGEQRFV

SEQ ID NO: 2735 - protein, 10 aa, synthetic construct
AQTHLQIRVA

SEQ ID NO: 2736 - protein, 10 aa, synthetic construct
AQAPPSSKAM

SEQ ID NO: 2737 - protein, 10 aa, synthetic construct
AQIVSKAMPA

SEQ ID NO: 2738 - protein, 10 aa, synthetic construct
AQASVRNNPS

SEQ ID NO: 2739 - protein, 10 aa, synthetic construct
AQAESRVAAL

SEQ ID NO: 2740 - protein, 10 aa, synthetic construct
LTNGAVRDRT

SEQ ID NO: 2741 - protein, 10 aa, synthetic construct
AQGRLAGSLA

SEQ ID NO: 2742 - protein, 10 aa, synthetic construct
AQAGQDSARR

SEQ ID NO: 2743 - protein, 10 aa, synthetic construct
AQAASRLGAV

SEQ ID NO: 2744 - protein, 10 aa, synthetic construct
AQALARGMAS

SEQ ID NO: 2745 - protein, 10 aa, synthetic construct
AQASRGLSMG

SEQ ID NO: 2746 - protein, 10 aa, synthetic construct
AQAQASSYGS

SEQ ID NO: 2747 - protein, 10 aa, synthetic construct
AKASRLPTPG

SEQ ID NO: 2748 - protein, 10 aa, synthetic construct
AQSLSRASTA

SEQ ID NO: 2749 - protein, 10 aa, synthetic construct
AQASTFVQTI

SEQ ID NO: 2750 - protein, 10 aa, synthetic construct
AQASSKVVAA

SEQ ID NO: 2751 - protein, 10 aa, synthetic construct
AQAYRNGEAA

SEQ ID NO: 2752 - protein, 10 aa, synthetic construct
AQAYSTGVRM

SEQ ID NO: 2753 - protein, 10 aa, synthetic construct
AQAVSSRSMG

SEQ ID NO: 2754 - protein, 10 aa, synthetic construct
AQARGGLATP

SEQ ID NO: 2755 - protein, 10 aa, synthetic construct
AQAGHSGVRA

SEQ ID NO: 2756 - protein, 10 aa, synthetic construct
AQPSYHGGAA

SEQ ID NO: 2757 - protein, 10 aa, synthetic construct
AQRVNQVSTA

SEQ ID NO: 2758 - protein, 10 aa, synthetic construct
AQAAFQQAST

SEQ ID NO: 2759 - protein, 10 aa, synthetic construct
AQAVPGSPRA

SEQ ID NO: 2760 - protein, 10 aa, synthetic construct
AQLSLSPLAA

SEQ ID NO: 2761 - protein, 10 aa, synthetic construct
AQANMTVRVS

SEQ ID NO: 2762 - protein, 10 aa, synthetic construct
AQATRSSGDP

SEQ ID NO: 2763 - protein, 10 aa, synthetic construct
AQVASNATRA

SEQ ID NO: 2764 - protein, 10 aa, synthetic construct
AQTNQQPRGA

SEQ ID NO: 2765 - protein, 10 aa, synthetic construct
AQRLQNDHLA

SEQ ID NO: 2766 - protein, 10 aa, synthetic construct
AQAPVQLGRP

SEQ ID NO: 2767 - protein, 10 aa, synthetic construct
AQRQGPDTLA

SEQ ID NO: 2768 - protein, 10 aa, synthetic construct
AQHTLSNHMA

SEQ ID NO: 2769 - protein, 10 aa, synthetic construct
AQLSGMVNRA

SEQ ID NO: 2770 - protein, 10 aa, synthetic construct
AQDRQVSSRA

SEQ ID NO: 2771 - protein, 10 aa, synthetic construct
AQRQLSTSLA

SEQ ID NO: 2772 - protein, 10 aa, synthetic construct
AQQRPTVSFA

SEQ ID NO: 2773 - protein, 10 aa, synthetic construct
AQAKPHSQLD

SEQ ID NO: 2774 - protein, 10 aa, synthetic construct
AQAGRVNHPP

SEQ ID NO: 2775 - protein, 10 aa, synthetic construct
AQAINSQSMR

SEQ ID NO: 2776 - protein, 10 aa, synthetic construct
AQYSTAVMSA

SEQ ID NO: 2777 - protein, 10 aa, synthetic construct
SQARAVERSA

SEQ ID NO: 2778 - protein, 10 aa, synthetic construct
AQAYKSSSVG

SEQ ID NO: 2779 - protein, 10 aa, synthetic construct
AQASTPGLYP

SEQ ID NO: 2780 - protein, 10 aa, synthetic construct
AQSRTSMLAA

SEQ ID NO: 2781 - protein, 10 aa, synthetic construct
AQLFSSNMPA

SEQ ID NO: 2782 - protein, 10 aa, synthetic construct
AQAYCTDVRM

SEQ ID NO: 2783 - protein, 10 aa, synthetic construct
AQTMSRGFVA

SEQ ID NO: 2784 - protein, 10 aa, synthetic construct
AQALNGYPAA

SEQ ID NO: 2785 - protein, 10 aa, synthetic construct
AQAQTGHPLK

SEQ ID NO: 2786 - protein, 10 aa, synthetic construct
AQASSNSQYR

SEQ ID NO: 2787 - protein, 10 aa, synthetic construct
AQAAIKSTIS

SEQ ID NO: 2788 - protein, 10 aa, synthetic construct
AQSTLNLRPA

SEQ ID NO: 2789 - protein, 10 aa, synthetic construct
AQATLSPGSG

SEQ ID NO: 2790 - protein, 10 aa, synthetic construct
AQANGSGTGR

SEQ ID NO: 2791 - protein, 10 aa, synthetic construct
STSLAVAGRA

SEQ ID NO: 2792 - protein, 10 aa, synthetic construct
AQASNLSAYR

SEQ ID NO: 2793 - protein, 10 aa, synthetic construct
AQASRQVLVA

SEQ ID NO: 2794 - protein, 10 aa, synthetic construct
NEVRAVFFEA

SEQ ID NO: 2795 - protein, 10 aa, synthetic construct
AKAQGSSSVG

SEQ ID NO: 2796 - protein, 10 aa, synthetic construct
ARGSAVQSQA

SEQ ID NO: 2797 - protein, 10 aa, synthetic construct
AVRVAVSSSA

SEQ ID NO: 2798 - protein, 10 aa, synthetic construct
AQAFSTSQFK

SEQ ID NO: 2799 - protein, 10 aa, synthetic construct
AQGTSSQRTA

SEQ ID NO: 2800 - protein, 10 aa, synthetic construct
AQATMSQTIA

SEQ ID NO: 2801 - protein, 10 aa, synthetic construct
AQSANRSTLA

SEQ ID NO: 2802 - protein, 10 aa, synthetic construct
AQRDLAHSKA

SEQ ID NO: 2803 - protein, 10 aa, synthetic construct
AQASKVGLYA

SEQ ID NO: 2804 - protein, 10 aa, synthetic construct
AQAYYTDVRM

SEQ ID NO: 2805 - protein, 10 aa, synthetic construct
AQAGLRDPRA

SEQ ID NO: 2806 - protein, 10 aa, synthetic construct
AQAFSQATGA

SEQ ID NO: 2807 - protein, 10 aa, synthetic construct
AQVAGMSVRA

SEQ ID NO: 2808 - protein, 10 aa, synthetic construct
AQAGQSSFTI

SEQ ID NO: 2809 - protein, 10 aa, synthetic construct
AQKEMRSQGA

SEQ ID NO: 2810 - protein, 10 aa, synthetic construct
AQNYSSGVRA

SEQ ID NO: 2811 - protein, 10 aa, synthetic construct
AQITVSYTRA

SEQ ID NO: 2812 - protein, 10 aa, synthetic construct
AQAQQPRSSI

SEQ ID NO: 2813 - protein, 10 aa, synthetic construct
WTSGAVPGKA

SEQ ID NO: 2814 - protein, 10 aa, synthetic construct
AQFKPSQVIA

SEQ ID NO: 2815 - protein, 10 aa, synthetic construct
RQGQAVGSSA

SEQ ID NO: 2816 - protein, 10 aa, synthetic construct
AQSISPHYAA

SEQ ID NO: 2817 - protein, 10 aa, synthetic construct
AQARSLNEYK

SEQ ID NO: 2818 - protein, 10 aa, synthetic construct
AQAASSRLMA

SEQ ID NO: 2819 - protein, 10 aa, synthetic construct
AQAYSTDGRM

SEQ ID NO: 2820 - protein, 10 aa, synthetic construct
AQASVPRVMG

SEQ ID NO: 2821 - protein, 10 aa, synthetic construct
AQGQMPRYPA

SEQ ID NO: 2822 - protein, 10 aa, synthetic construct
AQASSGMKPC

SEQ ID NO: 2823 - protein, 10 aa, synthetic construct
AQPLRSSLSA

SEQ ID NO: 2824 - protein, 10 aa, synthetic construct
AQNSASQSQA

SEQ ID NO: 2825 - protein, 10 aa, synthetic construct
AQGHLSGLRA

SEQ ID NO: 2826 - protein, 10 aa, synthetic construct
AQRAQSGVAA

SEQ ID NO: 2827 - protein, 10 aa, synthetic construct
AQANPRLQDK

SEQ ID NO: 2828 - protein, 10 aa, synthetic construct
AQAPRTATLG

SEQ ID NO: 2829 - protein, 10 aa, synthetic construct
AQRTASLSQA

SEQ ID NO: 2830 - protein, 10 aa, synthetic construct
AQGNPGLLRA

SEQ ID NO: 2831 - protein, 10 aa, synthetic construct
MSSHAVGNRA

SEQ ID NO: 2832 - protein, 10 aa, synthetic construct
AQLAPKASPA

SEQ ID NO: 2833 - protein, 10 aa, synthetic construct
AQTTQGRERA

SEQ ID NO: 2834 - protein, 10 aa, synthetic construct
AQASGKSTSS

SEQ ID NO: 2835 - protein, 10 aa, synthetic construct
AQAPHQHSMK

SEQ ID NO: 2836-3622 - skipped (787 entries)

SEQ ID NO: 3623 - DNA, 2232 bp, synthetic construct
  source 1..2232: mol_type = other DNA
atggctgccgatggttatcttccagattggctcgaggacaaccttagtgaaggaattcgcgagtggtgggctttgaaacctggagcccctcaacccaaggcaaatcaacaacatcaagacaacgctcgaggtcttgtgcttccgggttacaaataccttggacccggcaacggactcgacaagggggagccggtcaacgcagcagacgcggcggccctcgagcacgacaaggcctacgaccagcagctcaaggccggagacaacccgtacctcaagtacaaccacgccgacgccgagttccaggagcggctcaaagaagatacgtcttttgggggcaacctcgggcgagcagtcttccaggccaaaaagaggcttcttgaacctcttggtctggttgaggaagcggctaagacggctcctggaaagaagaggcctgtagagcagtctcctcaggaaccggactcctccgcgggtattggcaaatcgggtgcacagcccgctaaaaagagactcaatttcggtcagactggcgacacagagtcagtcccagaccctcaaccaatcggagaacctcccgcagccccctcaggtgtgggatctcttacaatggcttcaggtggtggcgcaccagtggcagacaataacgaaggtgccgatggagtgggtagttcctcgggaaattggcattgcgattcccaatggctgggggacagagtcatcaccaccagcacccgaacctgggccctgcccacctacaacaatcacctctacaagcaaatctccaacagcacatctggaggatcttcaaatgacaacgcctacttcggctacagcaccccctgggggtattttgacttcaacagattccactgccacttctcaccacgtgactggcagcgactcatcaacaacaactggggattccggcctaagcgactcaacttcaagctcttcaacattcaggtcaaagaggttacggacaacaatggagtcaagaccatcgccaataaccttaccagcacggtccaggtcttcacggactcagactatcagctcccgtacgtgctcgggtcggctcacgagggctgcctcccgccgttcccagcggacgttttcatgattcctcagtacgggtatctgacgcttaatgatggaagccaggccgtgggtcgttcgtccttttactgcctggaatatttcccgtcgcaaatgctaagaacgggtaacaacttccagttcagctacgagtttgagaacgtacctttccatagcagctacgctcacagccaaagcctggaccgactaatgaatccactcatcgaccaatacttgtactatctctcaaagactattaacggttctggacagaatcaacaaacgctaaaattcagtgtggccggacccagcaacatggctgtccagggaagaaactacatacctggacccagctaccgacaacaacgtgtctcaaccactgtgactcaaaacaacaacagcgaatttgcttggcctggagcttcttcttgggctctcaatggacgtaatagcttgatgaatcctggacctgctatggccagccacaaagaaggagaggaccgtttctttcctttgtctggatctttaatttttggcaaacaaggaactggaagagacaacgtggatgcggacaaagtcatgataaccaacgaagaagaaattaaaactactaacccggtagcaacggagtcctatggacaagtggccacaaaccaccagagtccgcttaatggtgccgtccatctttatgctcaggcgcagaccggctgggttcaaaaccaaggaatacttccgggtatggtttggcaggacagagatgtgtacctgcaaggacccatttgggccaaaattcctcacacggacggcaactttcacccttctccgctgatgggagggtttggaatgaagcacccgcctcctcagatcctcatcaaaaacacacctgtacctgccgatcctccaacggccttcaacaaggacaagctgaactctttcatcacccagtattctactggccaagtcagcgtggagatcgagtgggagctgcagaaggaaaacagcaagcggtggaacccggagatccagtacacttccaactattacaagtctaataatgttgaatttgctgttaatactgaaggtgtatatagtgaaccccgccccattggcaccagatacctgactcgtaatctgtaa

SEQ ID NO: 3624 - DNA, 2232 bp, synthetic construct
  source 1..2232: mol_type = other DNA
atggctgccgatggttatcttccagattggctcgaggacaaccttagtgaaggaattcgcgagtggtgggctttgaaacctggagcccctcaacccaaggcaaatcaacaacatcaagacaacgctcgaggtcttgtgcttccgggttacaaataccttggacccggcaacggactcgacaagggggagccggtcaacgcagcagacgcggcggccctcgagcacgacaaggcctacgaccagcagctcaaggccggagacaacccgtacctcaagtacaaccacgccgacgccgagttccaggagcggctcaaagaagatacgtcttttgggggcaacctcgggcgagcagtcttccaggccaaaaagaggcttcttgaacctcttggtctggttgaggaagcggctaagacggctcctggaaagaagaggcctgtagagcagtctcctcaggaaccggactcctccgcgggtattggcaaatcgggtgcacagcccgctaaaaagagactcaatttcggtcagactggcgacacagagtcagtcccagaccctcaaccaatcggagaacctcccgcagccccctcaggtgtgggatctcttacaatggcttcaggtggtggcgcaccagtggcagacaataacgaaggtgccgatggagtgggtagttcctcgggaaattggcattgcgattcccaatggctgggggacagagtcatcaccaccagcacccgaacctgggccctgcccacctacaacaatcacctctacaagcaaatctccaacagcacatctggaggatcttcaaatgacaacgcctacttcggctacagcaccccctgggggtattttgacttcaacagattccactgccacttctcaccacgtgactggcagcgactcatcaacaacaactggggattccggcctaagcgactcaacttcaagctcttcaacattcaggtcaaagaggttacggacaacaatggagtcaagaccatcgccaataaccttaccagcacggtccaggtcttcacggactcagactatcagctcccgtacgtgctcgggtcggctcacgagggctgcctcccgccgttcccagcggacgttttcatgattcctcagtacgggtatctgacgcttaatgatggaagccaggccgtgggtcgttcgtccttttactgcctggaatatttcccgtcgcaaatgctaagaacgggtaacaacttccagttcagctacgagtttgagaacgtacctttccatagcagctacgctcacagccaaagcctggaccgactaatgaatccactcatcgaccaatacttgtactatctctcaaagactattaacggttctggacagaatcaacaaacgctaaaattcagtgtggccggacccagcaacatggctgtccagggaagaaactacatacctggacccagctaccgacaacaacgtgtctcaaccactgtgactcaaaacaacaacagcgaatttgcttggcctggagcttcttcttgggctctcaatggacgtaatagcttgatgaatcctggacctgctatggccagccacaaagaaggagaggaccgtttctttcctttgtctggatctttaatttttggcaaacaaggaactggaagagacaacgtggatgcggacaaagtcatgataaccaacgaagaagaaattaaaactactaacccggtagcaacggagtcctatggacaagtggccacaaaccaccagagtgcacaggctcgtgattctccgaagggttggcaggcgcagaccggctgggttcaaaaccaaggaatacttccgggtatggtttggcaggacagagatgtgtacctgcaaggacccatttgggccaaaattcctcacacggacggcaactttcacccttctccgctgatgggagggtttggaatgaagcacccgcctcctcagatcctcatcaaaaacacacctgtacctgccgatcctccaacggccttcaacaaggacaagctgaactctttcatcacccagtattctactggccaagtcagcgtggagatcgagtgggagctgcagaaggaaaacagcaagcggtggaacccggagatccagtacacttccaactattacaagtctaataatgttgaatttgctgttaatactgaaggtgtatatagtgaaccccgccccattggcaccagatacctgactcgtaatctgtaa

SEQ ID NO: 3625 - DNA, 2232 bp, synthetic construct
  source 1..2232: mol_type = other DNA
atggctgccgatggttatcttccagattggctcgaggacaaccttagtgaaggaattcgcgagtggtgggctttgaaacctggagcccctcaacccaaggcaaatcaacaacatcaagacaacgctcgaggtcttgtgcttccgggttacaaataccttggacccggcaacggactcgacaagggggagccggtcaacgcagcagacgcggcggccctcgagcacgacaaggcctacgaccagcagctcaaggccggagacaacccgtacctcaagtacaaccacgccgacgccgagttccaggagcggctcaaagaagatacgtcttttgggggcaacctcgggcgagcagtcttccaggccaaaaagaggcttcttgaacctcttggtctggttgaggaagcggctaagacggctcctggaaagaagaggcctgtagagcagtctcctcaggaaccggactcctccgcgggtattggcaaatcgggtgcacagcccgctaaaaagagactcaatttcggtcagactggcgacacagagtcagtcccagaccctcaaccaatcggagaacctcccgcagccccctcaggtgtgggatctcttacaatggcttcaggtggtggcgcaccagtggcagacaataacgaaggtgccgatggagtgggtagttcctcgggaaattggcattgcgattcccaatggctgggggacagagtcatcaccaccagcacccgaacctgggccctgcccacctacaacaatcacctctacaagcaaatctccaacagcacatctggaggatcttcaaatgacaacgcctacttcggctacagcaccccctgggggtattttgacttcaacagattccactgccacttctcaccacgtgactggcagcgactcatcaacaacaactggggattccggcctaagcgactcaacttcaagctcttcaacattcaggtcaaagaggttacggacaacaatggagtcaagaccatcgccaataaccttaccagcacggtccaggtcttcacggactcagactatcagctcccgtacgtgctcgggtcggctcacgagggctgcctcccgccgttcccagcggacgttttcatgattcctcagtacgggtatctgacgcttaatgatggaagccaggccgtgggtcgttcgtccttttactgcctggaatatttcccgtcgcaaatgctaagaacgggtaacaacttccagttcagctacgagtttgagaacgtacctttccatagcagctacgctcacagccaaagcctggaccgactaatgaatccactcatcgaccaatacttgtactatctctcaaagactattaacggttctggacagaatcaacaaacgctaaaattcagtgtggccggacccagcaacatggctgtccagggaagaaactacatacctggacccagctaccgacaacaacgtgtctcaaccactgtgactcaaaacaacaacagcgaatttgcttggcctggagcttcttcttgggctctcaatggacgtaatagcttgatgaatcctggacctgctatggccagccacaaagaaggagaggaccgtttctttcctttgtctggatctttaatttttggcaaacaaggaactggaagagacaacgtggatgcggacaaagtcatgataaccaacgaagaagaaattaaaactactaacccggtagcaacggagtcctatggacaagtggccacaaaccaccagagtgcacaggctcgtgattctccgaagggttggcaggcgcagaccggctgggttcaaaaccaaggaatacttccgggtatggtttggcaggacagagatgtgtacctgcaaggacccatttgggccaaaattcctcacacggacggcaactttcacccttctccgctgatgggagggtttggaatgaagcacccgcctcctcagatcctcatcaaaaacacacctgtacctgcggatcctccaacggccttcaacaaggacaagctgaactctttcatcacccagtattctactggccaagtcagcgtggagatcgagtgggagctgcagaaggaaaacagcaagcgctggaacccggagatccagtacacttccaactattacaagtctaataatgttgaatttgctgttaatactgaaggtgtatatagtgaaccccgccccattggcaccagatacctgactcgtaatctgtaa

SEQ ID NO: 3626 - DNA, 2232 bp, synthetic construct
  source 1..2232: mol_type = other DNA
atggctgccgatggttatcttccagattggctcgaggacaaccttagtgaaggaattcgcgagtggtgggctttgaaacctggagcccctcaacccaaggcaaatcaacaacatcaagacaacgctcgaggtcttgtgcttccgggttacaaataccttggacccggcaacggactcgacaagggggagccggtcaacgcagcagacgcggcggccctcgagcacgacaaggcctacgaccagcagctcaaggccggagacaacccgtacctcaagtacaaccacgccgacgccgagttccaggagcggctcaaagaagatacgtcttttgggggcaacctcgggcgagcagtcttccaggccaaaaagaggcttcttgaacctcttggtctggttgaggaagcggctaagacggctcctggaaagaagaggcctgtagagcagtctcctcaggaaccggactcctccgcgggtattggcaaatcgggtgcacagcccgctaaaaagagactcaatttcggtcagactggcgacacagagtcagtcccagaccctcaaccaatcggagaacctcccgcagccccctcaggtgtgggatctcttacaatggcttcaggtggtggcgcaccagtggcagacaataacgaaggtgccgatggagtgggtagttcctcgggaaattggcattgcgattcccaatggctgggggacagagtcatcaccaccagcacccgaacctgggccctgcccacctacaacaatcacctctacaagcaaatctccaacagcacatctggaggatcttcaaatgacaacgcctacttcggctacagcaccccctgggggtattttgacttcaacagattccactgccacttctcaccacgtgactggcagcgactcatcaacaacaactggggattccggcctaagcgactcaacttcaagctcttcaacattcaggtcaaagaggttacggacaacaatggagtcaagaccatcgccaataaccttaccagcacggtccaggtcttcacggactcagactatcagctcccgtacgtgctcgggtcggctcacgagggctgcctcccgccgttcccagcggacgttttcatgattcctcagtacgggtatctgacgcttaatgatggaagccaggccgtgggtcgttcgtccttttactgcctggaatatttcccgtcgcaaatgctaagaacgggtaacaacttccagttcagctacgagtttgagaacgtacctttccatagcagctacgctcacagccaaagcctggaccgactaatgaatccactcatcgaccaatacttgtactatctctcaaagactattaacggttctggacagaatcaacaaacgctaaaattcagtgtggccggacccagcaacatggctgtccagggaagaaactacatacctggacccagctaccgacaacaacgtgtctcaaccactgtgactcaaaacaacaacagcgaatttgcttggcctggagcttcttcttgggctctcaatggacgtaatagcttgatgaatcctggacctgctatggccagccacaaagaaggagaggaccgtttctttcctttgtctggatctttaatttttggcaaacaaggaactggaagagacaacgtggatgcggacaaagtcatgataaccaacgaagaagaaattaaaactactaacccggtagcaacggagtcctatggacaagtggccacaaaccaccagagtgcacaggcttattctacggatgtgaggatgcaggcgcagaccggctgggttcaaaaccaaggaatacttccgggtatggtttggcaggacagagatgtgtacctgcaaggacccatttgggccaaaattcctcacacggacggcaactttcacccttctccgctgatgggagggtttggaatgaagcacccgcctcctcagatcctcatcaaaaacacacctgtacctgccgatcctccaacggccttcaacaaggacaagctgaactctttcatcacccagtattctactggccaagtcagcgtggagatcgagtgggagctgcagaaggaaaacagcaagcggtggaacccggagatccagtacacttccaactattacaagtctaataatgttgaatttgctgttaatactgaaggtgtatatagtgaaccccgccccattggcaccagatacctgactcgtaatctgtaa

SEQ ID NO: 3627 - DNA, 2232 bp, synthetic construct
  source 1..2232: mol_type = other DNA
atggctgccgatggttatcttccagattggctcgaggacaaccttagtgaaggaattcgcgagtggtgggctttgaaacctggagcccctcaacccaaggcaaatcaacaacatcaagacaacgctcgaggtcttgtgcttccgggttacaaataccttggacccggcaacggactcgacaagggggagccggtcaacgcagcagacgcggcggccctcgagcacgacaaggcctacgaccagcagctcaaggccggagacaacccgtacctcaagtacaaccacgccgacgccgagttccaggagcggctcaaagaagatacgtcttttgggggcaacctcgggcgagcagtcttccaggccaaaaagaggcttcttgaacctcttggtctggttgaggaagcggctaagacggctcctggaaagaagaggcctgtagagcagtctcctcaggaaccggactcctccgcgggtattggcaaatcgggtgcacagcccgctaaaaagagactcaatttcggtcagactggcgacacagagtcagtcccagaccctcaaccaatcggagaacctcccgcagccccctcaggtgtgggatctcttacaatggcttcaggtggtggcgcaccagtggcagacaataacgaaggtgccgatggagtgggtagttcctcgggaaattggcattgcgattcccaatggctgggggacagagtcatcaccaccagcacccgaacctgggccctgcccacctacaacaatcacctctacaagcaaatctccaacagcacatctggaggatcttcaaatgacaacgcctacttcggctacagcaccccctgggggtattttgacttcaacagattccactgccacttctcaccacgtgactggcagcgactcatcaacaacaactggggattccggcctaagcgactcaacttcaagctcttcaacattcaggtcaaagaggttacggacaacaatggagtcaagaccatcgccaataaccttaccagcacggtccaggtcttcacggactcagactatcagctcccgtacgtgctcgggtcggctcacgagggctgcctcccgccgttcccagcggacgttttcatgattcctcagtacgggtatctgacgcttaatgatggaagccaggccgtgggtcgttcgtccttttactgcctggaatatttcccgtcgcaaatgctaagaacgggtaacaacttccagttcagctacgagtttgagaacgtacctttccatagcagctacgctcacagccaaagcctggaccgactaatgaatccactcatcgaccaatacttgtactatctctcaaagactattaacggttctggacagaatcaacaaacgctaaaattcagtgtggccggacccagcaacatggctgtccagggaagaaactacatacctggacccagctaccgacaacaacgtgtctcaaccactgtgactcaaaacaacaacagcgaatttgcttggcctggagcttcttcttgggctctcaatggacgtaatagcttgatgaatcctggacctgctatggccagccacaaagaaggagaggaccgtttctttcctttgtctggatctttaatttttggcaaacaaggaactggaagagacaacgtggatgcggacaaagtcatgataaccaacgaagaagaaattaaaactactaacccggtagcaacggagtcctatggacaagtggccacaaaccaccagagtgcacagattgttatgaattcgttgaaggctcaggcgcagaccggctgggttcaaaaccaaggaatacttccgggtatggtttggcaggacagagatgtgtacctgcaaggacccatttgggccaaaattcctcacacggacggcaactttcacccttctccgctgatgggagggtttggaatgaagcacccgcctcctcagatcctcatcaaaaacacacctgtacctgccgatcctccaacggccttcaacaaggacaagctgaactctttcatcacccagtattctactggccaagtcagcgtggagatcgagtgggagctgcagaaggaaaacagcaagcggtggaacccggagatccagtacacttccaactattacaagtctaataatgttgaatttgctgttaatactgaaggtgtatatagtgaaccccgccccattggcaccagatacctgactcgtaatctgtaa

SEQ ID NO: 3628 - DNA, 2232 bp, synthetic construct
  source 1..2232: mol_type = other DNA
atggctgccgatggttatcttccagattggctcgaggacaaccttagtgaaggaattcgcgagtggtgggctttgaaacctggagcccctcaacccaaggcaaatcaacaacatcaagacaacgctcgaggtcttgtgcttccgggttacaaataccttggacccggcaacggactcgacaagggggagccggtcaacgcagcagacgcggcggccctcgagcacgacaaggcctacgaccagcagctcaaggccggagacaacccgtacctcaagtacaaccacgccgacgccgagttccaggagcggctcaaagaagatacgtcttttgggggcaacctcgggcgagcagtcttccaggccaaaaagaggcttcttgaacctcttggtctggttgaggaagcggctaagacggctcctggaaagaagaggcctgtagagcagtctcctcaggaaccggactcctccgcgggtattggcaaatcgggtgcacagcccgctaaaaagagactcaatttcggtcagactggcgacacagagtcagtcccagaccctcaaccaatcggagaacctcccgcagccccctcaggtgtgggatctcttacaatggcttcaggtggtggcgcaccagtggcagacaataacgaaggtgccgatggagtgggtagttcctcgggaaattggcattgcgattcccaatggctgggggacagagtcatcaccaccagcacccgaacctgggccctgcccacctacaacaatcacctctacaagcaaatctccaacagcacatctggaggatcttcaaatgacaacgcctacttcggctacagcaccccctgggggtattttgacttcaacagattccactgccacttctcaccacgtgactggcagcgactcatcaacaacaactggggattccggcctaagcgactcaacttcaagctcttcaacattcaggtcaaagaggttacggacaacaatggagtcaagaccatcgccaataaccttaccagcacggtccaggtcttcacggactcagactatcagctcccgtacgtgctcgggtcggctcacgagggctgcctcccgccgttcccagcggacgttttcatgattcctcagtacgggtatctgacgcttaatgatggaagccaggccgtgggtcgttcgtccttttactgcctggaatatttcccgtcgcaaatgctaagaacgggtaacaacttccagttcagctacgagtttgagaacgtacctttccatagcagctacgctcacagccaaagcctggaccgactaatgaatccactcatcgaccaatacttgtactatctctcaaagactattaacggttctggacagaatcaacaaacgctaaaattcagtgtggccggacccagcaacatggctgtccagggaagaaactacatacctggacccagctaccgacaacaacgtgtctcaaccactgtgactcaaaacaacaacagcgaatttgcttggcctggagcttcttcttgggctctcaatggacgtaatagcttgatgaatcctggacctgctatggccagccacaaagaaggagaggaccgtttctttcctttgtctggatctttaatttttggcaaacaaggaactggaagagacaacgtggatgcggacaaagtcatgataaccaacgaagaagaaattaaaactactaacccggtagcaacggagtcctatggacaagtggccacaaaccaccagagtgcacaggctcgggagagtcctcgtgggctgcaggcgcagaccggctgggttcaaaaccaaggaatacttccgggtatggtttggcaggacagagatgtgtacctgcaaggacccatttgggccaaaattcctcacacggacggcaactttcacccttctccgctgatgggagggtttggaatgaagcacccgcctcctcagatcctcatcaaaaacacacctgtacctgccgatcctccaacggccttcaacaaggacaagctgaactctttcatcacccagtattctactggccaagtcagcgtggagatcgagtgggagctgcagaaggaaaacagcaagcggtggaacccggagatccagtacacttccaactattacaagtctaataatgttgaatttgctgttaatactgaaggtgtatatagtgaaccccgccccattggcaccagatacctgactcgtaatctgtaa

SEQ ID NO: 3629 - DNA, 2232 bp, synthetic construct
  source 1..2232: mol_type = other DNA
atggctgccgatggttatcttccagattggctcgaggacaaccttagtgaaggaattcgcgagtggtgggctttgaaacctggagcccctcaacccaaggcaaatcaacaacatcaagacaacgctcgaggtcttgtgcttccgggttacaaataccttggacccggcaacggactcgacaagggggagccggtcaacgcagcagacgcggcggccctcgagcacgacaaggcctacgaccagcagctcaaggccggagacaacccgtacctcaagtacaaccacgccgacgccgagttccaggagcggctcaaagaagatacgtcttttgggggcaacctcgggcgagcagtcttccaggccaaaaagaggcttcttgaacctcttggtctggttgaggaagcggctaagacggctcctggaaagaagaggcctgtagagcagtctcctcaggaaccggactcctccgcgggtattggcaaatcgggtgcacagcccgctaaaaagagactcaatttcggtcagactggcgacacagagtcagtcccagaccctcaaccaatcggagaacctcccgcagccccctcaggtgtgggatctcttacaatggcttcaggtggtggcgcaccagtggcagacaataacgaaggtgccgatggagtgggtagttcctcgggaaattggcattgcgattcccaatggctgggggacagagtcatcaccaccagcacccgaacctgggccctgcccacctacaacaatcacctctacaagcaaatctccaacagcacatctggaggatcttcaaatgacaacgcctacttcggctacagcaccccctgggggtattttgacttcaacagattccactgccacttctcaccacgtgactggcagcgactcatcaacaacaactggggattccggcctaagcgactcaacttcaagctcttcaacattcaggtcaaagaggttacggacaacaatggagtcaagaccatcgccaataaccttaccagcacggtccaggtcttcacggactcagactatcagctcccgtacgtgctcgggtcggctcacgagggctgcctcccgccgttcccagcggacgttttcatgattcctcagtacgggtatctgacgcttaatgatggaagccaggccgtgggtcgttcgtccttttactgcctggaatatttcccgtcgcaaatgctaagaacgggtaacaacttccagttcagctacgagtttgagaacgtacctttccatagcagctacgctcacagccaaagcctggaccgactaatgaatccactcatcgaccaatacttgtactatctctcaaagactattaacggttctggacagaatcaacaaacgctaaaattcagtgtggccggacccagcaacatggctgtccagggaagaaactacatacctggacccagctaccgacaacaacgtgtctcaaccactgtgactcaaaacaacaacagcgaatttgcttggcctggagcttcttcttgggctctcaatggacgtaatagcttgatgaatcctggacctgctatggccagccacaaagaaggagaggaccgtttctttcctttgtctggatctttaatttttggcaaacaaggaactggaagagacaacgtggatgcggacaaagtcatgataaccaacgaagaagaaattaaaactactaacccggtagcaacggagtcctatggacaagtggccacaaaccaccagagtgcacaggctagttttaatgatactagggctcaggcgcagaccggctgggttcaaaaccaaggaatacttccgggtatggtttggcaggacagagatgtgtacctgcaaggacccatttgggccaaaattcctcacacggacggcaactttcacccttctccgctgatgggagggtttggaatgaagcacccgcctcctcagatcctcatcaaaaacacacctgtacctgccgatcctccaacggccttcaacaaggacaagctgaactctttcatcacccagtattctactggccaagtcagcgtggagatcgagtgggagctgcagaaggaaaacagcaagcggtggaacccggagatccagtacacttccaactattacaagtctaataatgttgaatttgctgttaatactgaaggtgtatatagtgaaccccgccccattggcaccagatacctgactcgtaatctgtaa

SEQ ID NO: 3630 - DNA, 2232 bp, synthetic construct
  source 1..2232: mol_type = other DNA
atggctgccgatggttatcttccagattggctcgaggacaaccttagtgaaggaattcgcgagtggtgggctttgaaacctggagcccctcaacccaaggcaaatcaacaacatcaagacaacgctcgaggtcttgtgcttccgggttacaaataccttggacccggcaacggactcgacaagggggagccggtcaacgcagcagacgcggcggccctcgagcacgacaaggcctacgaccagcagctcaaggccggagacaacccgtacctcaagtacaaccacgccgacgccgagttccaggagcggctcaaagaagatacgtcttttgggggcaacctcgggcgagcagtcttccaggccaaaaagaggcttcttgaacctcttggtctggttgaggaagcggctaagacggctcctggaaagaagaggcctgtagagcagtctcctcaggaaccggactcctccgcgggtattggcaaatcgggtgcacagcccgctaaaaagagactcaatttcggtcagactggcgacacagagtcagtcccagaccctcaaccaatcggagaacctcccgcagccccctcaggtgtgggatctcttacaatggcttcaggtggtggcgcaccagtggcagacaataacgaaggtgccgatggagtgggtagttcctcgggaaattggcattgcgattcccaatggctgggggacagagtcatcaccaccagcacccgaacctgggccctgcccacctacaacaatcacctctacaagcaaatctccaacagcacatctggaggatcttcaaatgacaacgcctacttcggctacagcaccccctgggggtattttgacttcaacagattccactgccacttctcaccacgtgactggcagcgactcatcaacaacaactggggattccggcctaagcgactcaacttcaagctcttcaacattcaggtcaaagaggttacggacaacaatggagtcaagaccatcgccaataaccttaccagcacggtccaggtcttcacggactcagactatcagctcccgtacgtgctcgggtcggctcacgagggctgcctcccgccgttcccagcggacgttttcatgattcctcagtacgggtatctgacgcttaatgatggaagccaggccgtgggtcgttcgtccttttactgcctggaatatttcccgtcgcaaatgctaagaacgggtaacaacttccagttcagctacgagtttgagaacgtacctttccatagcagctacgctcacagccaaagcctggaccgactaatgaatccactcatcgaccaatacttgtactatctctcaaagactattaacggttctggacagaatcaacaaacgctaaaattcagtgtggccggacccagcaacatggctgtccagggaagaaactacatacctggacccagctaccgacaacaacgtgtctcaaccactgtgactcaaaacaacaacagcgaatttgcttggcctggagcttcttcttgggctctcaatggacgtaatagcttgatgaatcctggacctgctatggccagccacaaagaaggagaggaccgtttctttcctttgtctggatctttaatttttggcaaacaaggaactggaagagacaacgtggatgcggacaaagtcatgataaccaacgaagaagaaattaaaactactaacccggtagcaacggagtcctatggacaagtggccacaaaccaccagagtggtggtacgttggccgtcgtgtcgcttgctcaggcgcagaccggctgggttcaaaaccaaggaatacttccgggtatggtttggcaggacagagatgtgtacctgcaaggacccatttgggccaaaattcctcacacggacggcaactttcacccttctccgctgatgggagggtttggaatgaagcacccgcctcctcagatcctcatcaaaaacacacctgtacctgccgatcctccaacggccttcaacaaggacaagctgaactctttcatcacccagtattctactggccaagtcagcgtggagatcgagtgggagctgcagaaggaaaacagcaagcggtggaacccggagatccagtacacttccaactattacaagtctaataatgttgaatttgctgttaatactgaaggtgtatatagtgaaccccgccccattggcaccagatacctgactcgtaatctgtaa

SEQ ID NO: 3631 - DNA, 2232 bp, synthetic construct
  source 1..2232: mol_type = other DNA
atggctgccgatggttatcttccagattggctcgaggacaaccttagtgaaggaattcgcgagtggtgggctttgaaacctggagcccctcaacccaaggcaaatcaacaacatcaagacaacgctcgaggtcttgtgcttccgggttacaaataccttggacccggcaacggactcgacaagggggagccggtcaacgcagcagacgcggcggccctcgagcacgacaaggcctacgaccagcagctcaaggccggagacaacccgtacctcaagtacaaccacgccgacgccgagttccaggagcggctcaaagaagatacgtcttttgggggcaacctcgggcgagcagtcttccaggccaaaaagaggcttcttgaacctcttggtctggttgaggaagcggctaagacggctcctggaaagaagaggcctgtagagcagtctcctcaggaaccggactcctccgcgggtattggcaaatcgggtgcacagcccgctaaaaagagactcaatttcggtcagactggcgacacagagtcagtcccagaccctcaaccaatcggagaacctcccgcagccccctcaggtgtgggatctcttacaatggcttcaggtggtggcgcaccagtggcagacaataacgaaggtgccgatggagtgggtagttcctcgggaaattggcattgcgattcccaatggctgggggacagagtcatcaccaccagcacccgaacctgggccctgcccacctacaacaatcacctctacaagcaaatctccaacagcacatctggaggatcttcaaatgacaacgcctacttcggctacagcaccccctgggggtattttgacttcaacagattccactgccacttctcaccacgtgactggcagcgactcatcaacaacaactggggattccggcctaagcgactcaacttcaagctcttcaacattcaggtcaaagaggttacggacaacaatggagtcaagaccatcgccaataaccttaccagcacggtccaggtcttcacggactcagactatcagctcccgtacgtgctcgggtcggctcacgagggctgcctcccgccgttcccagcggacgttttcatgattcctcagtacgggtatctgacgcttaatgatggaagccaggccgtgggtcgttcgtccttttactgcctggaatatttcccgtcgcaaatgctaagaacgggtaacaacttccagttcagctacgagtttgagaacgtacctttccatagcagctacgctcacagccaaagcctggaccgactaatgaatccactcatcgaccaatacttgtactatctctcaaagactattaacggttctggacagaatcaacaaacgctaaaattcagtgtggccggacccagcaacatggctgtccagggaagaaactacatacctggacccagctaccgacaacaacgtgtctcaaccactgtgactcaaaacaacaacagcgaatttgcttggcctggagcttcttcttgggctctcaatggacgtaatagcttgatgaatcctggacctgctatggccagccacaaagaaggagaggaccgtttctttcctttgtctggatctttaatttttggcaaacaaggaactggaagagacaacgtggatgcggacaaagtcatgataaccaacgaagaagaaattaaaactactaacccggtagcaacggagtcctatggacaagtggccacaaaccaccagagtgcacaggcttatgggttgccgaagggtcctcaggcgcagaccggctgggttcaaaaccaaggaatacttccgggtatggtttggcaggacagagatgtgtacctgcaaggacccatttgggccaaaattcctcacacggacggcaactttcacccttctccgctgatgggagggtttggaatgaagcacccgcctcctcagatcctcatcaaaaacacacctgtacctgccgatcctccaacggccttcaacaaggacaagctgaactctttcatcacccagtattctactggccaagtcagcgtggagatcgagtgggagctgcagaaggaaaacagcaagcggtggaacccggagatccagtacacttccaactattacaagtctaataatgttgaatttgctgttaatactgaaggtgtatatagtgaaccccgccccattggcaccagatacctgactcgtaatctgtaa

SEQ ID NO: 3632 - DNA, 2232 bp, synthetic construct
  source 1..2232: mol_type = other DNA
atggctgccgatggttatcttccagattggctcgaggacaaccttagtgaaggaattcgcgagtggtgggctttgaaacctggagcccctcaacccaaggcaaatcaacaacatcaagacaacgctcgaggtcttgtgcttccgggttacaaataccttggacccggcaacggactcgacaagggggagccggtcaacgcagcagacgcggcggccctcgagcacgacaaggcctacgaccagcagctcaaggccggagacaacccgtacctcaagtacaaccacgccgacgccgagttccaggagcggctcaaagaagatacgtcttttgggggcaacctcgggcgagcagtcttccaggccaaaaagaggcttcttgaacctcttggtctggttgaggaagcggctaagacggctcctggaaagaagaggcctgtagagcagtctcctcaggaaccggactcctccgcgggtattggcaaatcgggtgcacagcccgctaaaaagagactcaatttcggtcagactggcgacacagagtcagtcccagaccctcaaccaatcggagaacctcccgcagccccctcaggtgtgggatctcttacaatggcttcaggtggtggcgcaccagtggcagacaataacgaaggtgccgatggagtgggtagttcctcgggaaattggcattgcgattcccaatggctgggggacagagtcatcaccaccagcacccgaacctgggccctgcccacctacaacaatcacctctacaagcaaatctccaacagcacatctggaggatcttcaaatgacaacgcctacttcggctacagcaccccctgggggtattttgacttcaacagattccactgccacttctcaccacgtgactggcagcgactcatcaacaacaactggggattccggcctaagcgactcaacttcaagctcttcaacattcaggtcaaagaggttacggacaacaatggagtcaagaccatcgccaataaccttaccagcacggtccaggtcttcacggactcagactatcagctcccgtacgtgctcgggtcggctcacgagggctgcctcccgccgttcccagcggacgttttcatgattcctcagtacgggtatctgacgcttaatgatggaagccaggccgtgggtcgttcgtccttttactgcctggaatatttcccgtcgcaaatgctaagaacgggtaacaacttccagttcagctacgagtttgagaacgtacctttccatagcagctacgctcacagccaaagcctggaccgactaatgaatccactcatcgaccaatacttgtactatctctcaaagactattaacggttctggacagaatcaacaaacgctaaaattcagtgtggccggacccagcaacatggctgtccagggaagaaactacatacctggacccagctaccgacaacaacgtgtctcaaccactgtgactcaaaacaacaacagcgaatttgcttggcctggagcttcttcttgggctctcaatggacgtaatagcttgatgaatcctggacctgctatggccagccacaaagaaggagaggaccgtttctttcctttgtctggatctttaatttttggcaaacaaggaactggaagagacaacgtggatgcggacaaagtcatgataaccaacgaagaagaaattaaaactactaacccggtagcaacggagtcctatggacaagtggccacaaaccaccagagtgcacaggcttcgactgggacgcttcggcttcaggcgcagaccggctgggttcaaaaccaaggaatacttccgggtatggtttggcaggacagagatgtgtacctgcaaggacccatttgggccaaaattcctcacacggacggcaactttcacccttctccgctgatgggagggtttggaatgaagcacccgcctcctcagatcctcatcaaaaacacacctgtacctgccgatcctccaacggccttcaacaaggacaagctgaactctttcatcacccagtattctactggccaagtcagcgtggagatcgagtgggagctgcagaaggaaaacagcaagcggtggaacccggagatccagtacacttccaactattacaagtctaataatgttgaatttgctgttaatactgaaggtgtatatagtgaaccccgccccattggcaccagatacctgactcgtaatctgtaa

SEQ ID NO: 3633 - DNA, 2232 bp, synthetic construct
  source 1..2232: mol_type = other DNA
atggctgccgatggttatcttccagattggctcgaggacaaccttagtgaaggaattcgcgagtggtgggctttgaaacctggagcccctcaacccaaggcaaatcaacaacatcaagacaacgctcgaggtcttgtgcttccgggttacaaataccttggacccggcaacggactcgacaagggggagccggtcaacgcagcagacgcggcggccctcgagcacgacaaggcctacgaccagcagctcaaggccggagacaacccgtacctcaagtacaaccacgccgacgccgagttccaggagcggctcaaagaagatacgtcttttgggggcaacctcgggcgagcagtcttccaggccaaaaagaggcttcttgaacctcttggtctggttgaggaagcggctaagacggctcctggaaagaagaggcctgtagagcagtctcctcaggaaccggactcctccgcgggtattggcaaatcgggtgcacagcccgctaaaaagagactcaatttcggtcagactggcgacacagagtcagtcccagaccctcaaccaatcggagaacctcccgcagccccctcaggtgtgggatctcttacaatggcttcaggtggtggcgcaccagtggcagacaataacgaaggtgccgatggagtgggtagttcctcgggaaattggcattgcgattcccaatggctgggggacagagtcatcaccaccagcacccgaacctgggccctgcccacctacaacaatcacctctacaagcaaatctccaacagcacatctggaggatcttcaaatgacaacgcctacttcggctacagcaccccctgggggtattttgacttcaacagattccactgccacttctcaccacgtgactggcagcgactcatcaacaacaactggggattccggcctaagcgactcaacttcaagctcttcaacattcaggtcaaagaggttacggacaacaatggagtcaagaccatcgccaataaccttaccagcacggtccaggtcttcacggactcagactatcagctcccgtacgtgctcgggtcggctcacgagggctgcctcccgccgttcccagcggacgttttcatgattcctcagtacgggtatctgacgcttaatgatggaagccaggccgtgggtcgttcgtccttttactgcctggaatatttcccgtcgcaaatgctaagaacgggtaacaacttccagttcagctacgagtttgagaacgtacctttccatagcagctacgctcacagccaaagcctggaccgactaatgaatccactcatcgaccaatacttgtactatctctcaaagactattaacggttctggacagaatcaacaaacgctaaaattcagtgtggccggacccagcaacatggctgtccagggaagaaactacatacctggacccagctaccgacaacaacgtgtctcaaccactgtgactcaaaacaacaacagcgaatttgcttggcctggagcttcttcttgggctctcaatggacgtaatagcttgatgaatcctggacctgctatggccagccacaaagaaggagaggaccgtttctttcctttgtctggatctttaatttttggcaaacaaggaactggaagagacaacgtggatgcggacaaagtcatgataaccaacgaagaagaaattaaaactactaacccggtagcaacggagtcctatggacaagtggccacaaaccaccagagtgcgcaggcgtattcgacggatgagaggatgcaggcgcagaccggctgggttcaaaaccaaggaatacttccgggtatggtttggcaggacagagatgtgtacctgcaaggacccatttgggccaaaattcctcacacggacggcaactttcacccttctccgctgatgggagggtttggaatgaagcacccgcctcctcagatcctcatcaaaaacacacctgtacctgccgatcctccaacggccttcaacaaggacaagctgaactctttcatcacccagtattctactggccaagtcagcgtggagatcgagtgggagctgcagaaggaaaacagcaagcggtggaacccggagatccagtacacttccaactattacaagtctaataatgttgaatttgctgttaatactgaaggtgtatatagtgaaccccgccccattggcaccagatacctgactcgtaatctgtaa

SEQ ID NO: 3634 - DNA, 2232 bp, synthetic construct
  source 1..2232: mol_type = other DNA
atggctgccgatggttatcttccagattggctcgaggacaaccttagtgaaggaattcgcgagtggtgggctttgaaacctggagcccctcaacccaaggcaaatcaacaacatcaagacaacgctcgaggtcttgtgcttccgggttacaaataccttggacccggcaacggactcgacaagggggagccggtcaacgcagcagacgcggcggccctcgagcacgacaaggcctacgaccagcagctcaaggccggagacaacccgtacctcaagtacaaccacgccgacgccgagttccaggagcggctcaaagaagatacgtcttttgggggcaacctcgggcgagcagtcttccaggccaaaaagaggcttcttgaacctcttggtctggttgaggaagcggctaagacggctcctggaaagaagaggcctgtagagcagtctcctcaggaaccggactcctccgcgggtattggcaaatcgggtgcacagcccgctaaaaagagactcaatttcggtcagactggcgacacagagtcagtcccagaccctcaaccaatcggagaacctcccgcagccccctcaggtgtgggatctcttacaatggcttcaggtggtggcgcaccagtggcagacaataacgaaggtgccgatggagtgggtagttcctcgggaaattggcattgcgattcccaatggctgggggacagagtcatcaccaccagcacccgaacctgggccctgcccacctacaacaatcacctctacaagcaaatctccaacagcacatctggaggatcttcaaatgacaacgcctacttcggctacagcaccccctgggggtattttgacttcaacagattccactgccacttctcaccacgtgactggcagcgactcatcaacaacaactggggattccggcctaagcgactcaacttcaagctcttcaacattcaggtcaaagaggttacggacaacaatggagtcaagaccatcgccaataaccttaccagcacggtccaggtcttcacggactcagactatcagctcccgtacgtgctcgggtcggctcacgagggctgcctcccgccgttcccagcggacgttttcatgattcctcagtacgggtatctgacgcttaatgatggaagccaggccgtgggtcgttcgtccttttactgcctggaatatttcccgtcgcaaatgctaagaacgggtaacaacttccagttcagctacgagtttgagaacgtacctttccatagcagctacgctcacagccaaagcctggaccgactaatgaatccactcatcgaccaatacttgtactatctctcaaagactattaacggttctggacagaatcaacaaacgctaaaattcagtgtggccggacccagcaacatggctgtccagggaagaaactacatacctggacccagctaccgacaacaacgtgtctcaaccactgtgactcaaaacaacaacagcgaatttgcttggcctggagcttcttcttgggctctcaatggacgtaatagcttgatgaatcctggacctgctatggccagccacaaagaaggagaggaccgtttctttcctttgtctggatctttaatttttggcaaacaaggaactggaagagacaacgtggatgcggacaaagtcatgataaccaacgaagaagaaattaaaactactaacccggtagcaacggagtcctatggacaagtggccacaaaccaccagagtgcgcaggcgtattcgacggatgagaggaagcaggcgcagaccggctgggttcaaaaccaaggaatacttccgggtatggtttggcaggacagagatgtgtacctgcaaggacccatttgggccaaaattcctcacacggacggcaactttcacccttctccgctgatgggagggtttggaatgaagcacccgcctcctcagatcctcatcaaaaacacacctgtacctgccgatcctccaacggccttcaacaaggacaagctgaactctttcatcacccagtattctactggccaagtcagcgtggagatcgagtgggagctgcagaaggaaaacagcaagcggtggaacccggagatccagtacacttccaactattacaagtctaataatgttgaatttgctgttaatactgaaggtgtatatagtgaaccccgccccattggcaccagatacctgactcgtaatctgtaa

SEQ ID NO: 3635 - DNA, 2232 bp, synthetic construct
  source 1..2232: mol_type = other DNA
atggctgccgatggttatcttccagattggctcgaggacaaccttagtgaaggaattcgcgagtggtgggctttgaaacctggagcccctcaacccaaggcaaatcaacaacatcaagacaacgctcgaggtcttgtgcttccgggttacaaataccttggacccggcaacggactcgacaagggggagccggtcaacgcagcagacgcggcggccctcgagcacgacaaggcctacgaccagcagctcaaggccggagacaacccgtacctcaagtacaaccacgccgacgccgagttccaggagcggctcaaagaagatacgtcttttgggggcaacctcgggcgagcagtcttccaggccaaaaagaggcttcttgaacctcttggtctggttgaggaagcggctaagacggctcctggaaagaagaggcctgtagagcagtctcctcaggaaccggactcctccgcgggtattggcaaatcgggtgcacagcccgctaaaaagagactcaatttcggtcagactggcgacacagagtcagtcccagaccctcaaccaatcggagaacctcccgcagccccctcaggtgtgggatctcttacaatggcttcaggtggtggcgcaccagtggcagacaataacgaaggtgccgatggagtgggtagttcctcgggaaattggcattgcgattcccaatggctgggggacagagtcatcaccaccagcacccgaacctgggccctgcccacctacaacaatcacctctacaagcaaatctccaacagcacatctggaggatcttcaaatgacaacgcctacttcggctacagcaccccctgggggtattttgacttcaacagattccactgccacttctcaccacgtgactggcagcgactcatcaacaacaactggggattccggcctaagcgactcaacttcaagctcttcaacattcaggtcaaagaggttacggacaacaatggagtcaagaccatcgccaataaccttaccagcacggtccaggtcttcacggactcagactatcagctcccgtacgtgctcgggtcggctcacgagggctgcctcccgccgttcccagcggacgttttcatgattcctcagtacgggtatctgacgcttaatgatggaagccaggccgtgggtcgttcgtccttttactgcctggaatatttcccgtcgcaaatgctaagaacgggtaacaacttccagttcagctacgagtttgagaacgtacctttccatagcagctacgctcacagccaaagcctggaccgactaatgaatccactcatcgaccaatacttgtactatctctcaaagactattaacggttctggacagaatcaacaaacgctaaaattcagtgtggccggacccagcaacatggctgtccagggaagaaactacatacctggacccagctaccgacaacaacgtgtctcaaccactgtgactcaaaacaacaacagcgaatttgcttggcctggagcttcttcttgggctctcaatggacgtaatagcttgatgaatcctggacctgctatggccagccacaaagaaggagaggaccgtttctttcctttgtctggatctttaatttttggcaaacaaggaactggaagagacaacgtggatgcggacaaagtcatgataaccaacgaagaagaaattaaaactactaacccggtagcaacggagtcctatggacaagtggccacaaaccaccagagtgcacaggcttatgtttcgtctgttaagatgcaggcgcagaccggctgggttcaaaaccaaggaatacttccgggtatggtttggcaggacagagatgtgtacctgcaaggacccatttgggccaaaattcctcacacggacggcaactttcacccttctccgctgatgggagggtttggaatgaagcacccgcctcctcagatcctcatcaaaaacacacctgtacctgccgatcctccaacggccttcaacaaggacaagctgaactctttcatcacccagtattctactggccaagtcagcgtggagatcgagtgggagctgcagaaggaaaacagcaagcggtggaacccggagatccagtacacttccaactattacaagtctaataatgttgaatttgctgttaatactgaaggtgtatatagtgaaccccgccccattggcaccagatacctgactcgtaatctgtaa

SEQ ID NO: 3636 - protein, 743 aa, synthetic construct
MAADGYLPDWLEDNLSEGIREWWALKPGAPQPKANQQHQDNARGLVLPGYKYLGPGNGLDKGEPVNAADAAALEHDKAYDQQLKAGDNPYLKYNHADAEFQERLKEDTSFGGNLGRAVFQAKKRLLEPLGLVEEAAKTAPGKKRPVEQSPQEPDSSAGIGKSGAQPAKKRLNFGQTGDTESVPDPQPIGEPPAAPSGVGSLTMASGGGAPVADNNEGADGVGSSSGNWHCDSQWLGDRVITTSTRTWALPTYNNHLYKQISNSTSGGSSNDNAYFGYSTPWGYFDFNRFHCHFSPRDWQRLINNNWGFRPKRLNFKLFNIQVKEVTDNNGVKTIANNLTSTVQVFTDSDYQLPYVLGSAHEGCLPPFPADVFMIPQYGYLTLNDGSQAVGRSSFYCLEYFPSQMLRTGNNFQFSYEFENVPFHSSYAHSQSLDRLMNPLIDQYLYYLSKTINGSGQNQQTLKFSVAGPSNMAVQGRNYIPGPSYRQQRVSTTVTQNNNSEFAWPGASSWALNGRNSLMNPGPAMASHKEGEDRFFPLSGSLIFGKQGTGRDNVDADKVMITNEEEIKTTNPVATESYGQVATNHQSPLNGAVHLYAQAQTGWVQNQGILPGMVWQDRDVYLQGPIWAKIPHTDGNFHPSPLMGGFGMKHPPPQILIKNTPVPADPPTAFNKDKLNSFITQYSTGQVSVEIEWELQKENSKRWNPEIQYTSNYYKSNNVEFAVNTEGVYSEPRPIGTRYLTRNL

SEQ ID NO: 3637 - protein, 743 aa, synthetic construct
MAADGYLPDWLEDNLSEGIREWWALKPGAPQPKANQQHQDNARGLVLPGYKYLGPGNGLDKGEPVNAADAAALEHDKAYDQQLKAGDNPYLKYNHADAEFQERLKEDTSFGGNLGRAVFQAKKRLLEPLGLVEEAAKTAPGKKRPVEQSPQEPDSSAGIGKSGAQPAKKRLNFGQTGDTESVPDPQPIGEPPAAPSGVGSLTMASGGGAPVADNNEGADGVGSSSGNWHCDSQWLGDRVITTSTRTWALPTYNNHLYKQISNSTSGGSSNDNAYFGYSTPWGYFDFNRFHCHFSPRDWQRLINNNWGFRPKRLNFKLFNIQVKEVTDNNGVKTIANNLTSTVQVFTDSDYQLPYVLGSAHEGCLPPFPADVFMIPQYGYLTLNDGSQAVGRSSFYCLEYFPSQMLRTGNNFQFSYEFENVPFHSSYAHSQSLDRLMNPLIDQYLYYLSKTINGSGQNQQTLKFSVAGPSNMAVQGRNYIPGPSYRQQRVSTTVTQNNNSEFAWPGASSWALNGRNSLMNPGPAMASHKEGEDRFFPLSGSLIFGKQGTGRDNVDADKVMITNEEEIKTTNPVATESYGQVATNHQSAQARDSPKGWQAQTGWVQNQGILPGMVWQDRDVYLQGPIWAKIPHTDGNFHPSPLMGGFGMKHPPPQILIKNTPVPADPPTAFNKDKLNSFITQYSTGQVSVEIEWELQKENSKRWNPEIQYTSNYYKSNNVEFAVNTEGVYSEPRPIGTRYLTRNL

SEQ ID NO: 3638 - protein, 743 aa, synthetic construct
MAADGYLPDWLEDNLSEGIREWWALKPGAPQPKANQQHQDNARGLVLPGYKYLGPGNGLDKGEPVNAADAAALEHDKAYDQQLKAGDNPYLKYNHADAEFQERLKEDTSFGGNLGRAVFQAKKRLLEPLGLVEEAAKTAPGKKRPVEQSPQEPDSSAGIGKSGAQPAKKRLNFGQTGDTESVPDPQPIGEPPAAPSGVGSLTMASGGGAPVADNNEGADGVGSSSGNWHCDSQWLGDRVITTSTRTWALPTYNNHLYKQISNSTSGGSSNDNAYFGYSTPWGYFDFNRFHCHFSPRDWQRLINNNWGFRPKRLNFKLFNIQVKEVTDNNGVKTIANNLTSTVQVFTDSDYQLPYVLGSAHEGCLPPFPADVFMIPQYGYLTLNDGSQAVGRSSFYCLEYFPSQMLRTGNNFQFSYEFENVPFHSSYAHSQSLDRLMNPLIDQYLYYLSKTINGSGQNQQTLKFSVAGPSNMAVQGRNYIPGPSYRQQRVSTTVTQNNNSEFAWPGASSWALNGRNSLMNPGPAMASHKEGEDRFFPLSGSLIFGKQGTGRDNVDADKVMITNEEEIKTTNPVATESYGQVATNHQSAQAYSTDVRMQAQTGWVQNQGILPGMVWQDRDVYLQGPIWAKIPHTDGNFHPSPLMGGFGMKHPPPQILIKNTPVPADPPTAFNKDKLNSFITQYSTGQVSVEIEWELQKENSKRWNPEIQYTSNYYKSNNVEFAVNTEGVYSEPRPIGTRYLTRNL

SEQ ID NO: 3639 - protein, 743 aa, synthetic construct
MAADGYLPDWLEDNLSEGIREWWALKPGAPQPKANQQHQDNARGLVLPGYKYLGPGNGLDKGEPVNAADAAALEHDKAYDQQLKAGDNPYLKYNHADAEFQERLKEDTSFGGNLGRAVFQAKKRLLEPLGLVEEAAKTAPGKKRPVEQSPQEPDSSAGIGKSGAQPAKKRLNFGQTGDTESVPDPQPIGEPPAAPSGVGSLTMASGGGAPVADNNEGADGVGSSSGNWHCDSQWLGDRVITTSTRTWALPTYNNHLYKQISNSTSGGSSNDNAYFGYSTPWGYFDFNRFHCHFSPRDWQRLINNNWGFRPKRLNFKLFNIQVKEVTDNNGVKTIANNLTSTVQVFTDSDYQLPYVLGSAHEGCLPPFPADVFMIPQYGYLTLNDGSQAVGRSSFYCLEYFPSQMLRTGNNFQFSYEFENVPFHSSYAHSQSLDRLMNPLIDQYLYYLSKTINGSGQNQQTLKFSVAGPSNMAVQGRNYIPGPSYRQQRVSTTVTQNNNSEFAWPGASSWALNGRNSLMNPGPAMASHKEGEDRFFPLSGSLIFGKQGTGRDNVDADKVMITNEEEIKTTNPVATESYGQVATNHQSAQIVMNSLKAQAQTGWVQNQGILPGMVWQDRDVYLQGPIWAKIPHTDGNFHPSPLMGGFGMKHPPPQILIKNTPVPADPPTAFNKDKLNSFITQYSTGQVSVEIEWELQKENSKRWNPEIQYTSNYYKSNNVEFAVNTEGVYSEPRPIGTRYLTRNL

SEQ ID NO: 3640 - protein, 743 aa, synthetic construct
MAADGYLPDWLEDNLSEGIREWWALKPGAPQPKANQQHQDNARGLVLPGYKYLGPGNGLDKGEPVNAADAAALEHDKAYDQQLKAGDNPYLKYNHADAEFQERLKEDTSFGGNLGRAVFQAKKRLLEPLGLVEEAAKTAPGKKRPVEQSPQEPDSSAGIGKSGAQPAKKRLNFGQTGDTESVPDPQPIGEPPAAPSGVGSLTMASGGGAPVADNNEGADGVGSSSGNWHCDSQWLGDRVITTSTRTWALPTYNNHLYKQISNSTSGGSSNDNAYFGYSTPWGYFDFNRFHCHFSPRDWQRLINNNWGFRPKRLNFKLFNIQVKEVTDNNGVKTIANNLTSTVQVFTDSDYQLPYVLGSAHEGCLPPFPADVFMIPQYGYLTLNDGSQAVGRSSFYCLEYFPSQMLRTGNNFQFSYEFENVPFHSSYAHSQSLDRLMNPLIDQYLYYLSKTINGSGQNQQTLKFSVAGPSNMAVQGRNYIPGPSYRQQRVSTTVTQNNNSEFAWPGASSWALNGRNSLMNPGPAMASHKEGEDRFFPLSGSLIFGKQGTGRDNVDADKVMITNEEEIKTTNPVATESYGQVATNHQSAQARESPRGLQAQTGWVQNQGILPGMVWQDRDVYLQGPIWAKIPHTDGNFHPSPLMGGFGMKHPPPQILIKNTPVPADPPTAFNKDKLNSFITQYSTGQVSVEIEWELQKENSKRWNPEIQYTSNYYKSNNVEFAVNTEGVYSEPRPIGTRYLTRNL

SEQ ID NO: 3641 - protein, 743 aa, synthetic construct
MAADGYLPDWLEDNLSEGIREWWALKPGAPQPKANQQHQDNARGLVLPGYKYLGPGNGLDKGEPVNAADAAALEHDKAYDQQLKAGDNPYLKYNHADAEFQERLKEDTSFGGNLGRAVFQAKKRLLEPLGLVEEAAKTAPGKKRPVEQSPQEPDSSAGIGKSGAQPAKKRLNFGQTGDTESVPDPQPIGEPPAAPSGVGSLTMASGGGAPVADNNEGADGVGSSSGNWHCDSQWLGDRVITTSTRTWALPTYNNHLYKQISNSTSGGSSNDNAYFGYSTPWGYFDFNRFHCHFSPRDWQRLINNNWGFRPKRLNFKLFNIQVKEVTDNNGVKTIANNLTSTVQVFTDSDYQLPYVLGSAHEGCLPPFPADVFMIPQYGYLTLNDGSQAVGRSSFYCLEYFPSQMLRTGNNFQFSYEFENVPFHSSYAHSQSLDRLMNPLIDQYLYYLSKTINGSGQNQQTLKFSVAGPSNMAVQGRNYIPGPSYRQQRVSTTVTQNNNSEFAWPGASSWALNGRNSLMNPGPAMASHKEGEDRFFPLSGSLIFGKQGTGRDNVDADKVMITNEEEIKTTNPVATESYGQVATNHQSAQASFNDTRAQAQTGWVQNQGILPGMVWQDRDVYLQGPIWAKIPHTDGNFHPSPLMGGFGMKHPPPQILIKNTPVPADPPTAFNKDKLNSFITQYSTGQVSVEIEWELQKENSKRWNPEIQYTSNYYKSNNVEFAVNTEGVYSEPRPIGTRYLTRNL

SEQ ID NO: 3642 - protein, 743 aa, synthetic construct
MAADGYLPDWLEDNLSEGIREWWALKPGAPQPKANQQHQDNARGLVLPGYKYLGPGNGLDKGEPVNAADAAALEHDKAYDQQLKAGDNPYLKYNHADAEFQERLKEDTSFGGNLGRAVFQAKKRLLEPLGLVEEAAKTAPGKKRPVEQSPQEPDSSAGIGKSGAQPAKKRLNFGQTGDTESVPDPQPIGEPPAAPSGVGSLTMASGGGAPVADNNEGADGVGSSSGNWHCDSQWLGDRVITTSTRTWALPTYNNHLYKQISNSTSGGSSNDNAYFGYSTPWGYFDFNRFHCHFSPRDWQRLINNNWGFRPKRLNFKLFNIQVKEVTDNNGVKTIANNLTSTVQVFTDSDYQLPYVLGSAHEGCLPPFPADVFMIPQYGYLTLNDGSQAVGRSSFYCLEYFPSQMLRTGNNFQFSYEFENVPFHSSYAHSQSLDRLMNPLIDQYLYYLSKTINGSGQNQQTLKFSVAGPSNMAVQGRNYIPGPSYRQQRVSTTVTQNNNSEFAWPGASSWALNGRNSLMNPGPAMASHKEGEDRFFPLSGSLIFGKQGTGRDNVDADKVMITNEEEIKTTNPVATESYGQVATNHQSGGTLAVVSLAQAQTGWVQNQGILPGMVWQDRDVYLQGPIWAKIPHTDGNFHPSPLMGGFGMKHPPPQILIKNTPVPADPPTAFNKDKLNSFITQYSTGQVSVEIEWELQKENSKRWNPEIQYTSNYYKSNNVEFAVNTEGVYSEPRPIGTRYLTRNL

SEQ ID NO: 3643 - protein, 743 aa, synthetic construct
MAADGYLPDWLEDNLSEGIREWWALKPGAPQPKANQQHQDNARGLVLPGYKYLGPGNGLDKGEPVNAADAAALEHDKAYDQQLKAGDNPYLKYNHADAEFQERLKEDTSFGGNLGRAVFQAKKRLLEPLGLVEEAAKTAPGKKRPVEQSPQEPDSSAGIGKSGAQPAKKRLNFGQTGDTESVPDPQPIGEPPAAPSGVGSLTMASGGGAPVADNNEGADGVGSSSGNWHCDSQWLGDRVITTSTRTWALPTYNNHLYKQISNSTSGGSSNDNAYFGYSTPWGYFDFNRFHCHFSPRDWQRLINNNWGFRPKRLNFKLFNIQVKEVTDNNGVKTIANNLTSTVQVFTDSDYQLPYVLGSAHEGCLPPFPADVFMIPQYGYLTLNDGSQAVGRSSFYCLEYFPSQMLRTGNNFQFSYEFENVPFHSSYAHSQSLDRLMNPLIDQYLYYLSKTINGSGQNQQTLKFSVAGPSNMAVQGRNYIPGPSYRQQRVSTTVTQNNNSEFAWPGASSWALNGRNSLMNPGPAMASHKEGEDRFFPLSGSLIFGKQGTGRDNVDADKVMITNEEEIKTTNPVATESYGQVATNHQSAQAYGLPKGPQAQTGWVQNQGILPGMVWQDRDVYLQGPIWAKIPHTDGNFHPSPLMGGFGMKHPPPQILIKNTPVPADPPTAFNKDKLNSFITQYSTGQVSVEIEWELQKENSKRWNPEIQYTSNYYKSNNVEFAVNTEGVYSEPRPIGTRYLTRNL

SEQ ID NO: 3644 - protein, 743 aa, synthetic construct
MAADGYLPDWLEDNLSEGIREWWALKPGAPQPKANQQHQDNARGLVLPGYKYLGPGNGLDKGEPVNAADAAALEHDKAYDQQLKAGDNPYLKYNHADAEFQERLKEDTSFGGNLGRAVFQAKKRLLEPLGLVEEAAKTAPGKKRPVEQSPQEPDSSAGIGKSGAQPAKKRLNFGQTGDTESVPDPQPIGEPPAAPSGVGSLTMASGGGAPVADNNEGADGVGSSSGNWHCDSQWLGDRVITTSTRTWALPTYNNHLYKQISNSTSGGSSNDNAYFGYSTPWGYFDFNRFHCHFSPRDWQRLINNNWGFRPKRLNFKLFNIQVKEVTDNNGVKTIANNLTSTVQVFTDSDYQLPYVLGSAHEGCLPPFPADVFMIPQYGYLTLNDGSQAVGRSSFYCLEYFPSQMLRTGNNFQFSYEFENVPFHSSYAHSQSLDRLMNPLIDQYLYYLSKTINGSGQNQQTLKFSVAGPSNMAVQGRNYIPGPSYRQQRVSTTVTQNNNSEFAWPGASSWALNGRNSLMNPGPAMASHKEGEDRFFPLSGSLIFGKQGTGRDNVDADKVMITNEEEIKTTNPVATESYGQVATNHQSAQASTGTLRLQAQTGWVQNQGILPGMVWQDRDVYLQGPIWAKIPHTDGNFHPSPLMGGFGMKHPPPQILIKNTPVPADPPTAFNKDKLNSFITQYSTGQVSVEIEWELQKENSKRWNPEIQYTSNYYKSNNVEFAVNTEGVYSEPRPIGTRYLTRNL

SEQ ID NO: 3645 - protein, 743 aa, synthetic construct
MAADGYLPDWLEDNLSEGIREWWALKPGAPQPKANQQHQDNARGLVLPGYKYLGPGNGLDKGEPVNAADAAALEHDKAYDQQLKAGDNPYLKYNHADAEFQERLKEDTSFGGNLGRAVFQAKKRLLEPLGLVEEAAKTAPGKKRPVEQSPQEPDSSAGIGKSGAQPAKKRLNFGQTGDTESVPDPQPIGEPPAAPSGVGSLTMASGGGAPVADNNEGADGVGSSSGNWHCDSQWLGDRVITTSTRTWALPTYNNHLYKQISNSTSGGSSNDNAYFGYSTPWGYFDFNRFHCHFSPRDWQRLINNNWGFRPKRLNFKLFNIQVKEVTDNNGVKTIANNLTSTVQVFTDSDYQLPYVLGSAHEGCLPPFPADVFMIPQYGYLTLNDGSQAVGRSSFYCLEYFPSQMLRTGNNFQFSYEFENVPFHSSYAHSQSLDRLMNPLIDQYLYYLSKTINGSGQNQQTLKFSVAGPSNMAVQGRNYIPGPSYRQQRVSTTVTQNNNSEFAWPGASSWALNGRNSLMNPGPAMASHKEGEDRFFPLSGSLIFGKQGTGRDNVDADKVMITNEEEIKTTNPVATESYGQVATNHQSAQAYSTDERMQAQTGWVQNQGILPGMVWQDRDVYLQGPIWAKIPHTDGNFHPSPLMGGFGMKHPPPQILIKNTPVPADPPTAFNKDKLNSFITQYSTGQVSVEIEWELQKENSKRWNPEIQYTSNYYKSNNVEFAVNTEGVYSEPRPIGTRYLTRNL

SEQ ID NO: 3646 - protein, 743 aa, synthetic construct
MAADGYLPDWLEDNLSEGIREWWALKPGAPQPKANQQHQDNARGLVLPGYKYLGPGNGLDKGEPVNAADAAALEHDKAYDQQLKAGDNPYLKYNHADAEFQERLKEDTSFGGNLGRAVFQAKKRLLEPLGLVEEAAKTAPGKKRPVEQSPQEPDSSAGIGKSGAQPAKKRLNFGQTGDTESVPDPQPIGEPPAAPSGVGSLTMASGGGAPVADNNEGADGVGSSSGNWHCDSQWLGDRVITTSTRTWALPTYNNHLYKQISNSTSGGSSNDNAYFGYSTPWGYFDFNRFHCHFSPRDWQRLINNNWGFRPKRLNFKLFNIQVKEVTDNNGVKTIANNLTSTVQVFTDSDYQLPYVLGSAHEGCLPPFPADVFMIPQYGYLTLNDGSQAVGRSSFYCLEYFPSQMLRTGNNFQFSYEFENVPFHSSYAHSQSLDRLMNPLIDQYLYYLSKTINGSGQNQQTLKFSVAGPSNMAVQGRNYIPGPSYRQQRVSTTVTQNNNSEFAWPGASSWALNGRNSLMNPGPAMASHKEGEDRFFPLSGSLIFGKQGTGRDNVDADKVMITNEEEIKTTNPVATESYGQVATNHQSAQAYSTDERKQAQTGWVQNQGILPGMVWQDRDVYLQGPIWAKIPHTDGNFHPSPLMGGFGMKHPPPQILIKNTPVPADPPTAFNKDKLNSFITQYSTGQVSVEIEWELQKENSKRWNPEIQYTSNYYKSNNVEFAVNTEGVYSEPRPIGTRYLTRNL

SEQ ID NO: 3647 - protein, 743 aa, synthetic construct
MAADGYLPDWLEDNLSEGIREWWALKPGAPQPKANQQHQDNARGLVLPGYKYLGPGNGLDKGEPVNAADAAALEHDKAYDQQLKAGDNPYLKYNHADAEFQERLKEDTSFGGNLGRAVFQAKKRLLEPLGLVEEAAKTAPGKKRPVEQSPQEPDSSAGIGKSGAQPAKKRLNFGQTGDTESVPDPQPIGEPPAAPSGVGSLTMASGGGAPVADNNEGADGVGSSSGNWHCDSQWLGDRVITTSTRTWALPTYNNHLYKQISNSTSGGSSNDNAYFGYSTPWGYFDFNRFHCHFSPRDWQRLINNNWGFRPKRLNFKLFNIQVKEVTDNNGVKTIANNLTSTVQVFTDSDYQLPYVLGSAHEGCLPPFPADVFMIPQYGYLTLNDGSQAVGRSSFYCLEYFPSQMLRTGNNFQFSYEFENVPFHSSYAHSQSLDRLMNPLIDQYLYYLSKTINGSGQNQQTLKFSVAGPSNMAVQGRNYIPGPSYRQQRVSTTVTQNNNSEFAWPGASSWALNGRNSLMNPGPAMASHKEGEDRFFPLSGSLIFGKQGTGRDNVDADKVMITNEEEIKTTNPVATESYGQVATNHQSAQAYVSSVKMQAQTGWVQNQGILPGMVWQDRDVYLQGPIWAKIPHTDGNFHPSPLMGGFGMKHPPPQILIKNTPVPADPPTAFNKDKLNSFITQYSTGQVSVEIEWELQKENSKRWNPEIQYTSNYYKSNNVEFAVNTEGVYSEPRPIGTRYLTRNL

SEQ ID NO: 3648 - protein, 9 aa, synthetic construct
PLNGAVHLY

SEQ ID NO: 3649 - protein, 7 aa, synthetic construct
RDSPKGW

SEQ ID NO: 3650 - protein, 7 aa, synthetic construct
YSTDVRM

SEQ ID NO: 3651 - protein, 7 aa, synthetic construct
IVMNSLK

SEQ ID NO: 3652 - protein, 7 aa, synthetic construct
RESPRGL

SEQ ID NO: 3653 - protein, 7 aa, synthetic construct
SFNDTRA

SEQ ID NO: 3654 - protein, 9 aa, synthetic construct
GGTLAVVSL

SEQ ID NO: 3655 - protein, 7 aa, synthetic construct
YGLPKGP

SEQ ID NO: 3656 - protein, 7 aa, synthetic construct
STGTLRL

SEQ ID NO: 3657 - protein, 7 aa, synthetic construct
YSTDERM

SEQ ID NO: 3658 - protein, 7 aa, synthetic construct
YSTDERK

SEQ ID NO: 3659 - protein, 7 aa, synthetic construct
YVSSVKM

SEQ ID NO: 3660 - DNA, 27 bp, synthetic construct
  source 1..27: mol_type = other DNA
ccgcttaatggtgccgtccatctttat

SEQ ID NO: 3661 - DNA, 23 bp, synthetic construct
  source 1..23: mol_type = other DNA
cgtgattctccgaagggttggca

SEQ ID NO: 3662 - DNA, 23 bp, synthetic construct
  source 1..23: mol_type = other DNA
tattctacggatgtgaggatgca

SEQ ID NO: 3663 - DNA, 23 bp, synthetic construct
  source 1..23: mol_type = other DNA
attgttatgaattcgttgaaggc

SEQ ID NO: 3664 - DNA, 23 bp, synthetic construct
  source 1..23: mol_type = other DNA
cgggagagtcctcgtgggctgca

SEQ ID NO: 3665 - DNA, 23 bp, synthetic construct
  source 1..23: mol_type = other DNA
agttttaatgatactagggctca

SEQ ID NO: 3666 - DNA, 27 bp, synthetic construct
  source 1..27: mol_type = other DNA
ggtggtacgttggccgtcgtgtcgctt

SEQ ID NO: 3667 - DNA, 21 bp, synthetic construct
  source 1..21: mol_type = other DNA
tatgggttgccgaagggtcct

SEQ ID NO: 3668 - DNA, 21 bp, synthetic construct
  source 1..21: mol_type = other DNA
tcgactgggacgcttcggctt

SEQ ID NO: 3669 - DNA, 21 bp, synthetic construct
  source 1..21: mol_type = other DNA
tattcgacggatgagaggatg

SEQ ID NO: 3670 - DNA, 21 bp, synthetic construct
  source 1..21: mol_type = other DNA
tattcgacggatgagaggaag

SEQ ID NO: 3671 - DNA, 21 bp, synthetic construct
  source 1..21: mol_type = other DNA
tatgtttcgtctgttaagatg

SEQ ID NO: 3672 - DNA, 23 bp, synthetic construct
  source 1..23: mol_type = other DNA
acaaacaccattgtcacactcca

SEQ ID NO: 3673 - DNA, 71 bp, synthetic construct
  source 1..71: mol_type = other DNA
acaaacaccattgtcacactccacacaaacaccattgtcacactccacacaaacaccattgtcacactcca

SEQ ID NO: 3674 - DNA, 23 bp, synthetic construct
  source 1..23: mol_type = other DNA
tccataaagtaggaaacactaca

SEQ ID NO: 3675 - DNA, 22 bp, synthetic construct
  source 1..22: mol_type = other DNA
agtgaattctaccagtgccata

SEQ ID NO: 3676 - DNA, 24 bp, synthetic construct
  source 1..24: mol_type = other DNA
agtgtgagttctaccattgccaaa

SEQ ID NO: 3677 - DNA, 23 bp, synthetic construct
  source 1..23: mol_type = other DNA
agcaaaaatgtgctagtgccaaa

SEQ ID NO: 3678 - protein, 4 aa, synthetic construct
PLNG

SEQ ID NO: 3679 - protein, 5 aa, synthetic construct
PLNGA

SEQ ID NO: 3680 - protein, 6 aa, synthetic construct
PLNGAV

SEQ ID NO: 3681 - protein, 7 aa, synthetic construct
PLNGAVH

SEQ ID NO: 3682 - protein, 8 aa, synthetic construct
PLNGAVHL

SEQ ID NO: 3683 - protein, 4 aa, synthetic construct
NGAV

SEQ ID NO: 3684 - protein, 4 aa, synthetic construct
GAVH

SEQ ID NO: 3685 - protein, 5 aa, synthetic construct
NGAVH

SEQ ID NO: 3686 - protein, 5 aa, synthetic construct
GAVHL

SEQ ID NO: 3687 - protein, 5 aa, synthetic construct
AVHLY

SEQ ID NO: 3688 - protein, 6 aa, synthetic construct
NGAVHL

SEQ ID NO: 3689 - protein, 7 aa, synthetic construct
NGAVHLY

SEQ ID NO: 3690 - protein, 4 aa, synthetic construct
YSTD

SEQ ID NO: 3691 - protein, 5 aa, synthetic construct
YSTDE

SEQ ID NO: 3692 - protein, 6 aa, synthetic construct
YSTDER

SEQ ID NO: 3693 - protein, 4 aa, synthetic construct
IVMN

SEQ ID NO: 3694 - protein, 5 aa, synthetic construct
IVMNS

SEQ ID NO: 3695 - protein, 6 aa, synthetic construct
IVMNSL

SEQ ID NO: 3696-3699 - skipped (4 entries)

SEQ ID NO: 3700 - protein, 5 aa, synthetic construct
YSTDV

SEQ ID NO: 3701 - protein, 6 aa, synthetic construct
YSTDVR

SEQ ID NO: 3702-4678 - skipped (977 entries)

SEQ ID NO: 4679 - DNA, 22 bp, synthetic construct
  source 1..22: mol_type = other DNA
atacatacttctttacattcca

SEQ ID NO: 4680 - protein, 4 aa, synthetic construct
VHLY

SEQ ID NO: 4681 - protein, 4 aa, synthetic construct
VHIY

SEQ ID NO: 4682 - protein, 4 aa, synthetic construct
VHVY

SEQ ID NO: 4683 - protein, 4 aa, synthetic construct
VHHY

SEQ ID NO: 4684 - protein, 5 aa, synthetic construct
SLNGA

SEQ ID NO: 4685 - protein, 5 aa, synthetic construct
QLNGA

SEQ ID NO: 4686 - protein, 5 aa, synthetic construct
ALNGA

SEQ ID NO: 4687 - protein, 5 aa, synthetic construct
PLNGS

SEQ ID NO: 4688 - protein, 5 aa, synthetic construct
PVNGA

SEQ ID NO: 4689 - protein, 5 aa, synthetic construct
PLNGG

SEQ ID NO: 4690 - protein, 5 aa, synthetic construct
PLNGT

SEQ ID NO: 4691 - protein, 5 aa, synthetic construct
PLDGA

SEQ ID NO: 4692 - protein, 5 aa, synthetic construct
QLNGS

SEQ ID NO: 4693 - protein, 5 aa, synthetic construct
PLNGN

SEQ ID NO: 4694 - protein, 5 aa, synthetic construct
SLDGA

SEQ ID NO: 4695 - protein, 5 aa, synthetic construct
HLNGA

SEQ ID NO: 4696 - protein, 5 aa, synthetic construct
ALNGT

SEQ ID NO: 4697 - protein, 5 aa, synthetic construct
PINGA

SEQ ID NO: 4698 - protein, 5 aa, synthetic construct
ALDGA

SEQ ID NO: 4699 - protein, 5 aa, synthetic construct
PLNCA

SEQ ID NO: 4700 - protein, 5 aa, synthetic construct
PLNGQ

SEQ ID NO: 4701 - protein, 5 aa, synthetic construct
PLDSA

SEQ ID NO: 4702 - protein, 5 aa, synthetic construct
RLDGA

SEQ ID NO: 4703 - protein, 5 aa, synthetic construct
QLNGN

SEQ ID NO: 4704 - protein, 5 aa, synthetic construct
PLNGY

SEQ ID NO: 4705 - protein, 5 aa, synthetic construct
PLDSS

SEQ ID NO: 4706 - protein, 5 aa, synthetic construct
PLNGC

SEQ ID NO: 4707 - protein, 5 aa, synthetic construct
PLYGA

SEQ ID NO: 4708 - protein, 5 aa, synthetic construct
TLNGA

SEQ ID NO: 4709 - protein, 5 aa, synthetic construct
PVDGA

SEQ ID NO: 4710 - protein, 5 aa, synthetic construct
PLKGA

SEQ ID NO: 4711 - protein, 5 aa, synthetic construct
PLNGD

SEQ ID NO: 4712 - protein, 5 aa, synthetic construct
KLDGA

SEQ ID NO: 4713 - protein, 5 aa, synthetic construct
PHNGA

SEQ ID NO: 4714 - protein, 5 aa, synthetic construct
PLNGV

SEQ ID NO: 4715 - protein, 5 aa, synthetic construct
PLNAA

SEQ ID NO: 4716 - protein, 5 aa, synthetic construct
QLNGY

SEQ ID NO: 4717 - protein, 5 aa, synthetic construct
PLDGS

SEQ ID NO: 4718 - protein, 5 aa, synthetic construct
LLNGA

SEQ ID NO: 4719 - protein, 5 aa, synthetic construct
PLNRA

SEQ ID NO: 4720 - protein, 5 aa, synthetic construct
PLIGA

SEQ ID NO: 4721 - protein, 5 aa, synthetic construct
PRNGA

SEQ ID NO: 4722 - protein, 5 aa, synthetic construct
ALNGS

SEQ ID NO: 4723 - protein, 4 aa, synthetic construct
VPLY

SEQ ID NO: 4724 - protein, 4 aa, synthetic construct
VNLY

SEQ ID NO: 4725 - protein, 4 aa, synthetic construct
VHRY

SEQ ID NO: 4726 - protein, 4 aa, synthetic construct
FHLY

SEQ ID NO: 4727 - protein, 4 aa, synthetic construct
LHLY

SEQ ID NO: 4728 - protein, 4 aa, synthetic construct
DHLY

SEQ ID NO: 4729 - protein, 4 aa, synthetic construct
VQLY

SEQ ID NO: 4730 - protein, 4 aa, synthetic construct
IHLY

SEQ ID NO: 4731 - protein, 4 aa, synthetic construct
VDLY

SEQ ID NO: 4732 - protein, 4 aa, synthetic construct
AHLY

SEQ ID NO: 4733 - protein, 4 aa, synthetic construct
VLLY

SEQ ID NO: 4734 - protein, 4 aa, synthetic construct
GHLY

SEQ ID NO: 4735 - protein, 4 aa, synthetic construct
VRLY

SEQ ID NO: 4736 - protein, 4 aa, synthetic construct
VYLY

SEQ ID NO: 4737 - protein, 4 aa, synthetic construct
AQAQ

SEQ ID NO: 4738 - protein, 4 aa, synthetic construct
SQAQ

SEQ ID NO: 4739 - protein, 4 aa, synthetic construct
AQPQ

SEQ ID NO: 4740 - protein, 4 aa, synthetic construct
AQSQ

SEQ ID NO: 4741 - protein, 4 aa, synthetic construct
AKAQ

SEQ ID NO: 4742 - protein, 4 aa, synthetic construct
AHAQ

SEQ ID NO: 4743 - protein, 4 aa, synthetic construct
AQAP

SEQ ID NO: 4744 - protein, 4 aa, synthetic construct
DQAQ

SEQ ID NO: 4745 - protein, 4 aa, synthetic construct
APAQ

SEQ ID NO: 4746 - protein, 4 aa, synthetic construct
AQAK

SEQ ID NO: 4747 - protein, 4 aa, synthetic construct
AQAH

SEQ ID NO: 4748 - protein, 4 aa, synthetic construct
AQEQ

SEQ ID NO: 4749 - protein, 4 aa, synthetic construct
ALAQ

SEQ ID NO: 4750 - protein, 4 aa, synthetic construct
ARAQ

SEQ ID NO: 4751 - protein, 4 aa, synthetic construct
TQAQ

SEQ ID NO: 4752 - protein, 4 aa, synthetic construct
PLNN

SEQ ID NO: 4753 - protein, 4 aa, synthetic construct
PSAR

SEQ ID NO: 4754 - protein, 4 aa, synthetic construct
TLNG

SEQ ID NO: 4755 - protein, 4 aa, synthetic construct
PLNM

SEQ ID NO: 4756 - protein, 4 aa, synthetic construct
SLNG

SEQ ID NO: 4757 - protein, 4 aa, synthetic construct
SING

SEQ ID NO: 4758 - protein, 4 aa, synthetic construct
ALNG

SEQ ID NO: 4759 - protein, 4 aa, synthetic construct
PLNL

SEQ ID NO: 4760 - protein, 4 aa, synthetic construct
PGRQ

SEQ ID NO: 4761 - protein, 4 aa, synthetic construct
LVNS

SEQ ID NO: 4762 - protein, 4 aa, synthetic construct
ALDG

SEQ ID NO: 4763 - protein, 4 aa, synthetic construct
PING

SEQ ID NO: 4764 - protein, 4 aa, synthetic construct
PLDG

SEQ ID NO: 4765 - protein, 4 aa, synthetic construct
PLDS

SEQ ID NO: 4766 - protein, 4 aa, synthetic construct
QLNG

SEQ ID NO: 4767 - protein, 4 aa, synthetic construct
SLDG

SEQ ID NO: 4768 - protein, 8 aa, synthetic construct
LDGAVHLY

SEQ ID NO: 4769 - protein, 8 aa, synthetic construct
LNGAVHLY

SEQ ID NO: 4770 - protein, 8 aa, synthetic construct
INGAVHLY

SEQ ID NO: 4771 - protein, 8 aa, synthetic construct
LDSAVHLY

SEQ ID NO: 4772 - protein, 8 aa, synthetic construct
LDSSVHLY

SEQ ID NO: 4773 - protein, 8 aa, synthetic construct
LNGGVHLY

SEQ ID NO: 4774 - protein, 8 aa, synthetic construct
LNGNVHLY

SEQ ID NO: 4775 - protein, 8 aa, synthetic construct
LNGSVHLY

SEQ ID NO: 4776 - protein, 8 aa, synthetic construct
LNGTVHLY

SEQ ID NO: 4777 - protein, 8 aa, synthetic construct
LNGAVHIY

SEQ ID NO: 4778 - protein, 8 aa, synthetic construct
LDGAVHVY

SEQ ID NO: 4779 - protein, 8 aa, synthetic construct
LNGAVHHY

SEQ ID NO: 4780 - protein, 9 aa, synthetic construct
ALDGAVHLY

SEQ ID NO: 4781 - protein, 9 aa, synthetic construct
ALNGAVHLY

SEQ ID NO: 4782 - protein, 9 aa, synthetic construct
PINGAVHLY

SEQ ID NO: 4783 - protein, 9 aa, synthetic construct
PLDGAVHLY

SEQ ID NO: 4784 - protein, 9 aa, synthetic construct
PLDSAVHLY

SEQ ID NO: 4785 - protein, 9 aa, synthetic construct
PLDSSVHLY

SEQ ID NO: 4786 - protein, 9 aa, synthetic construct
PLNGGVHLY

SEQ ID NO: 4787 - protein, 9 aa, synthetic construct
PLNGNVHLY

SEQ ID NO: 4788 - protein, 9 aa, synthetic construct
PLNGSVHLY

SEQ ID NO: 4789 - protein, 9 aa, synthetic construct
PLNGTVHLY

SEQ ID NO: 4790 - protein, 9 aa, synthetic construct
QLNGAVHLY

SEQ ID NO: 4791 - protein, 9 aa, synthetic construct
SLDGAVHLY

SEQ ID NO: 4792 - protein, 9 aa, synthetic construct
SLNGAVHLY

SEQ ID NO: 4793 - protein, 9 aa, synthetic construct
TLNGAVHLY

SEQ ID NO: 4794 - protein, 9 aa, synthetic construct
PLNGAVHIY

SEQ ID NO: 4795 - protein, 9 aa, synthetic construct
PLDGAVHVY

SEQ ID NO: 4796 - protein, 9 aa, synthetic construct
PLNGAVHHY

SEQ ID NO: 4797 - protein, 8 aa, synthetic construct
VHLYAQAQ

SEQ ID NO: 4798 - protein, 8 aa, synthetic construct
VHLYAQPQ

SEQ ID NO: 4799 - protein, 8 aa, synthetic construct
VHLYSQAQ

SEQ ID NO: 4800 - protein, 8 aa, synthetic construct
VHLYAKAQ

SEQ ID NO: 4801 - protein, 8 aa, synthetic construct
VHLYDQAQ

SEQ ID NO: 4802 - protein, 8 aa, synthetic construct
VHIYAQAQ

SEQ ID NO: 4803 - protein, 8 aa, synthetic construct
VHVYAQAQ

SEQ ID NO: 4804 - protein, 8 aa, synthetic construct
VHHYAQAQ

SEQ ID NO: 4805 - protein, 11 aa, synthetic construct
ALDGAVHLYAQ

SEQ ID NO: 4806 - protein, 11 aa, synthetic construct
ALNGAVHLYAQ

SEQ ID NO: 4807 - protein, 11 aa, synthetic construct
PINGAVHLYAQ

SEQ ID NO: 4808 - protein, 11 aa, synthetic construct
PLDGAVHLYAQ

SEQ ID NO: 4809 - protein, 11 aa, synthetic construct
PLDGAVHLYSQ

SEQ ID NO: 4810 - protein, 11 aa, synthetic construct
PLDSAVHLYAQ

SEQ ID NO: 4811 - protein, 11 aa, synthetic construct
PLDSSVHLYAQ

SEQ ID NO: 4812 - protein, 11 aa, synthetic construct
PLNGAVHLYAK

SEQ ID NO: 4813 - protein, 11 aa, synthetic construct
PLNGAVHLYAQ

SEQ ID NO: 4814 - protein, 11 aa, synthetic construct
PLNGAVHLYDQ

SEQ ID NO: 4815 - protein, 11 aa, synthetic construct
PLNGAVHLYSQ

SEQ ID NO: 4816 - protein, 11 aa, synthetic construct
PLNGGVHLYAQ

SEQ ID NO: 4817 - protein, 11 aa, synthetic construct
PLNGNVHLYAQ

SEQ ID NO: 4818 - protein, 11 aa, synthetic construct
PLNGSVHLYAQ

SEQ ID NO: 4819 - protein, 11 aa, synthetic construct
PLNGTVHLYAQ

SEQ ID NO: 4820 - protein, 11 aa, synthetic construct
QLNGAVHLYAQ

SEQ ID NO: 4821 - protein, 11 aa, synthetic construct
SLDGAVHLYAQ

SEQ ID NO: 4822 - protein, 11 aa, synthetic construct
SLNGAVHLYAQ

SEQ ID NO: 4823 - protein, 11 aa, synthetic construct
TLNGAVHLYAQ

SEQ ID NO: 4824 - protein, 11 aa, synthetic construct
PLNGAVHIYAQ

SEQ ID NO: 4825 - protein, 11 aa, synthetic construct
PLDGAVHVYAQ

SEQ ID NO: 4826 - protein, 11 aa, synthetic construct
PLNGAVHHYAQ

SEQ ID NO: 4827 - protein, 13 aa, synthetic construct
ALDGAVHLYAQAQ

SEQ ID NO: 4828 - protein, 13 aa, synthetic construct
ALNGAVHLYAQAQ

SEQ ID NO: 4829 - protein, 13 aa, synthetic construct
PINGAVHLYAQAQ

SEQ ID NO: 4830 - protein, 13 aa, synthetic construct
PLDGAVHLYAQAQ

SEQ ID NO: 4831 - protein, 13 aa, synthetic construct
PLDGAVHLYAQPQ

SEQ ID NO: 4832 - protein, 13 aa, synthetic construct
PLDGAVHLYSQAQ

SEQ ID NO: 4833 - protein, 13 aa, synthetic construct
PLDSAVHLYAQAQ

SEQ ID NO: 4834 - protein, 13 aa, synthetic construct
PLDSSVHLYAQAQ

SEQ ID NO: 4835 - protein, 13 aa, synthetic construct
PLNGAVHLYAKAQ

SEQ ID NO: 4836 - protein, 13 aa, synthetic construct
PLNGAVHLYAQAQ

SEQ ID NO: 4837 - protein, 13 aa, synthetic construct
PLNGAVHLYAQPQ

SEQ ID NO: 4838 - protein, 13 aa, synthetic construct
PLNGAVHLYDQAQ

SEQ ID NO: 4839 - protein, 13 aa, synthetic construct
PLNGAVHLYSQAQ

SEQ ID NO: 4840 - protein, 13 aa, synthetic construct
PLNGGVHLYAQAQ

SEQ ID NO: 4841 - protein, 13 aa, synthetic construct
PLNGNVHLYAQAQ

SEQ ID NO: 4842 - protein, 13 aa, synthetic construct
PLNGSVHLYAQAQ

SEQ ID NO: 4843 - protein, 13 aa, synthetic construct
PLNGTVHLYAQAQ

SEQ ID NO: 4844 - protein, 13 aa, synthetic construct
QLNGAVHLYAQAQ

SEQ ID NO: 4845 - protein, 13 aa, synthetic construct
SLDGAVHLYAQAQ

SEQ ID NO: 4846 - protein, 13 aa, synthetic construct
SLNGAVHLYAQAQ

SEQ ID NO: 4847 - protein, 13 aa, synthetic construct
TLNGAVHLYAQAQ

SEQ ID NO: 4848 - protein, 13 aa, synthetic construct
PLNGAVHIYAQAQ

SEQ ID NO: 4849 - protein, 13 aa, synthetic construct
PLDGAVHVYAQAQ

SEQ ID NO: 4850 - protein, 13 aa, synthetic construct
PLNGAVHHYAQAQ

SEQ ID NO: 4851 - protein, 6 aa, synthetic construct
TGWVQN

SEQ ID NO: 4852 - protein, 6 aa, synthetic construct
LAAVQN

SEQ ID NO: 4853 - protein, 6 aa, synthetic construct
LTPVQN

SEQ ID NO: 4854 - protein, 6 aa, synthetic construct
SAPVQN

SEQ ID NO: 4855 - protein, 6 aa, synthetic construct
SSPVQN

SEQ ID NO: 4856 - protein, 6 aa, synthetic construct
TGRVQN

SEQ ID NO: 4857 - protein, 6 aa, synthetic construct
TGWAQN

SEQ ID NO: 4858 - protein, 6 aa, synthetic construct
TGWVQS

SEQ ID NO: 4859 - protein, 6 aa, synthetic construct
TLAVQN

SEQ ID NO: 4860 - protein, 6 aa, synthetic construct
TTSVQN

SEQ ID NO: 4861 - protein, 6 aa, synthetic construct
TSPVQN

SEQ ID NO: 4862 - protein, 6 aa, synthetic construct
TALVQN

SEQ ID NO: 4863 - protein, 6 aa, synthetic construct
TAWVQN

SEQ ID NO: 4864 - protein, 6 aa, synthetic construct
TGGVQN

SEQ ID NO: 4865 - protein, 6 aa, synthetic construct
TGSVQN

SEQ ID NO: 4866 - protein, 6 aa, synthetic construct
TGWDQN

SEQ ID NO: 4867 - protein, 6 aa, synthetic construct
TVSVQN

SEQ ID NO: 4868 - protein, 6 aa, synthetic construct
VSPVQN

SEQ ID NO: 4869 - protein, 6 aa, synthetic construct
VSSVQN

SEQ ID NO: 4870 - protein, 6 aa, synthetic construct
AAPVQN

SEQ ID NO: 4871 - protein, 6 aa, synthetic construct
AGPVQN

SEQ ID NO: 4872 - protein, 6 aa, synthetic construct
ASPVQN

SEQ ID NO: 4873 - protein, 6 aa, synthetic construct
ATPVQN

SEQ ID NO: 4874 - protein, 6 aa, synthetic construct
CSPVQN

SEQ ID NO: 4875 - protein, 6 aa, synthetic construct
CTPVQN

SEQ ID NO: 4876 - protein, 6 aa, synthetic construct
IAAVQN

SEQ ID NO: 4877 - protein, 6 aa, synthetic construct
IAGVQN

SEQ ID NO: 4878 - protein, 6 aa, synthetic construct
IASVQN

SEQ ID NO: 4879 - protein, 6 aa, synthetic construct
IGGVQN

SEQ ID NO: 4880 - protein, 6 aa, synthetic construct
IGSVQN

SEQ ID NO: 4881 - protein, 6 aa, synthetic construct
ILGVQN

SEQ ID NO: 4882 - protein, 6 aa, synthetic construct
IQPVQN

SEQ ID NO: 4883 - protein, 6 aa, synthetic construct
IQSVQN

SEQ ID NO: 4884 - protein, 6 aa, synthetic construct
ISGVQN

SEQ ID NO: 4885 - protein, 6 aa, synthetic construct
ISPVQN

SEQ ID NO: 4886 - protein, 6 aa, synthetic construct
ISSVQN

SEQ ID NO: 4887 - protein, 6 aa, synthetic construct
ITPVQN

SEQ ID NO: 4888 - protein, 6 aa, synthetic construct
LAGVQN

SEQ ID NO: 4889 - protein, 6 aa, synthetic construct
LAHVQN

SEQ ID NO: 4890 - protein, 6 aa, synthetic construct
LANVQN

SEQ ID NO: 4891 - protein, 6 aa, synthetic construct
LAPVQN

SEQ ID NO: 4892 - protein, 6 aa, synthetic construct
LAPVQT

SEQ ID NO: 4893 - protein, 6 aa, synthetic construct
LAQVQN

SEQ ID NO: 4894 - protein, 6 aa, synthetic construct
LARVQN

SEQ ID NO: 4895 - protein, 6 aa, synthetic construct
LASVQN

SEQ ID NO: 4896 - protein, 6 aa, synthetic construct
LATVQN

SEQ ID NO: 4897 - protein, 6 aa, synthetic construct
LGPVQN

SEQ ID NO: 4898 - protein, 6 aa, synthetic construct
LGQVQN

SEQ ID NO: 4899 - protein, 6 aa, synthetic construct
LGSVQN

SEQ ID NO: 4900 - protein, 6 aa, synthetic construct
LHPVQN

SEQ ID NO: 4901 - protein, 6 aa, synthetic construct
LKSVQN

SEQ ID NO: 4902 - protein, 6 aa, synthetic construct
LMAVQN

SEQ ID NO: 4903 - protein, 6 aa, synthetic construct
LMGVQN

SEQ ID NO: 4904 - protein, 6 aa, synthetic construct
LMPVQN

SEQ ID NO: 4905 - protein, 6 aa, synthetic construct
LMQVQN

SEQ ID NO: 4906 - protein, 6 aa, synthetic construct
LMSVQN

SEQ ID NO: 4907 - protein, 6 aa, synthetic construct
LNPVQN

SEQ ID NO: 4908 - protein, 6 aa, synthetic construct
LQPVQN

SEQ ID NO: 4909 - protein, 6 aa, synthetic construct
LQQVQN

SEQ ID NO: 4910 - protein, 6 aa, synthetic construct
LQRVQN

SEQ ID NO: 4911 - protein, 6 aa, synthetic construct
LSHVQN

SEQ ID NO: 4912 - protein, 6 aa, synthetic construct
LSKVQN

SEQ ID NO: 4913 - protein, 6 aa, synthetic construct
LSPVQK

SEQ ID NO: 4914 - protein, 6 aa, synthetic construct
LSPVQN

SEQ ID NO: 4915 - protein, 6 aa, synthetic construct
LSQVQN

SEQ ID NO: 4916 - protein, 6 aa, synthetic construct
LSRVQN

SEQ ID NO: 4917 - protein, 6 aa, synthetic construct
LSTVQN

SEQ ID NO: 4918 - protein, 6 aa, synthetic construct
LTAVQN

SEQ ID NO: 4919 - protein, 6 aa, synthetic construct
LTNVQN

SEQ ID NO: 4920 - protein, 6 aa, synthetic construct
LTSVQN

SEQ ID NO: 4921 - protein, 6 aa, synthetic construct
MAPVQN

SEQ ID NO: 4922 - protein, 6 aa, synthetic construct
NAQVQN

SEQ ID NO: 4923 - protein, 6 aa, synthetic construct
NASVQN

SEQ ID NO: 4924 - protein, 6 aa, synthetic construct
NMQVQN

SEQ ID NO: 4925 - protein, 6 aa, synthetic construct
NSPVQN

SEQ ID NO: 4926 - protein, 6 aa, synthetic construct
NTPVQN

SEQ ID NO: 4927 - protein, 6 aa, synthetic construct
NVQVQN

SEQ ID NO: 4928 - protein, 6 aa, synthetic construct
QAPVQN

SEQ ID NO: 4929 - protein, 6 aa, synthetic construct
RAAVQN

SEQ ID NO: 4930 - protein, 6 aa, synthetic construct
RAQVQN

SEQ ID NO: 4931 - protein, 6 aa, synthetic construct
RASVQN

SEQ ID NO: 4932 - protein, 6 aa, synthetic construct
RGGVQN

SEQ ID NO: 4933 - protein, 6 aa, synthetic construct
RGSVQN

SEQ ID NO: 4934 - protein, 6 aa, synthetic construct
RIAVQN

SEQ ID NO: 4935 - protein, 6 aa, synthetic construct
RIGVQN

SEQ ID NO: 4936 - protein, 6 aa, synthetic construct
RIPVQN

SEQ ID NO: 4937 - protein, 6 aa, synthetic construct
RLGVQN

SEQ ID NO: 4938 - protein, 6 aa, synthetic construct
RLSVQN

SEQ ID NO: 4939 - protein, 6 aa, synthetic construct
RMSVQN

SEQ ID NO: 4940 - protein, 6 aa, synthetic construct
RNSVQN

SEQ ID NO: 4941 - protein, 6 aa, synthetic construct
RQPVQN

SEQ ID NO: 4942 - protein, 6 aa, synthetic construct
RSAVQN

SEQ ID NO: 4943 - protein, 6 aa, synthetic construct
RSGVQN

SEQ ID NO: 4944 - protein, 6 aa, synthetic construct
RSPVQN

SEQ ID NO: 4945 - protein, 6 aa, synthetic construct
RSQVQN

SEQ ID NO: 4946 - protein, 6 aa, synthetic construct
RSSVQN

SEQ ID NO: 4947 - protein, 6 aa, synthetic construct
RSTVQN

SEQ ID NO: 4948 - protein, 6 aa, synthetic construct
RTAVQN

SEQ ID NO: 4949 - protein, 6 aa, synthetic construct
RTGVQN

SEQ ID NO: 4950 - protein, 6 aa, synthetic construct
RTLVQN

SEQ ID NO: 4951 - protein, 6 aa, synthetic construct
RTSVQN

SEQ ID NO: 4952 - protein, 6 aa, synthetic construct
RTTVQN

SEQ ID NO: 4953 - protein, 6 aa, synthetic construct
RVEVQN

SEQ ID NO: 4954 - protein, 6 aa, synthetic construct
SAAVQN

SEQ ID NO: 4955 - protein, 6 aa, synthetic construct
SAKVQN

SEQ ID NO: 4956 - protein, 6 aa, synthetic construct
SAMVQN

SEQ ID NO: 4957 - protein, 6 aa, synthetic construct
SAQVQN

SEQ ID NO: 4958 - protein, 6 aa, synthetic construct
SGPVQN

SEQ ID NO: 4959 - protein, 6 aa, synthetic construct
SMAVQN

SEQ ID NO: 4960 - protein, 6 aa, synthetic construct
SMGVQN

SEQ ID NO: 4961 - protein, 6 aa, synthetic construct
SMQVQN

SEQ ID NO: 4962 - protein, 6 aa, synthetic construct
SMSVQN

SEQ ID NO: 4963 - protein, 6 aa, synthetic construct
STPVQN

SEQ ID NO: 4964 - protein, 6 aa, synthetic construct
SVAVQN

SEQ ID NO: 4965 - protein, 6 aa, synthetic construct
SVGVQN

SEQ ID NO: 4966 - protein, 6 aa, synthetic construct
TAAVQN

SEQ ID NO: 4967 - protein, 6 aa, synthetic construct
TAGVQN

SEQ ID NO: 4968 - protein, 6 aa, synthetic construct
TAKVQN

SEQ ID NO: 4969 - protein, 6 aa, synthetic construct
TAMVQN

SEQ ID NO: 4970 - protein, 6 aa, synthetic construct
TANVQN

SEQ ID NO: 4971 - protein, 6 aa, synthetic construct
TAPVQN

SEQ ID NO: 4972 - protein, 6 aa, synthetic construct
TAPVQT

SEQ ID NO: 4973 - protein, 6 aa, synthetic construct
TAQVQN

SEQ ID NO: 4974 - protein, 6 aa, synthetic construct
TASVQN

SEQ ID NO: 4975 - protein, 6 aa, synthetic construct
TASVQT

SEQ ID NO: 4976 - protein, 6 aa, synthetic construct
TATVQN

SEQ ID NO: 4977 - protein, 6 aa, synthetic construct
TAVVQN

SEQ ID NO: 4978 - protein, 6 aa, synthetic construct
TAWDQN

SEQ ID NO: 4979 - protein, 6 aa, synthetic construct
TAWVQH

SEQ ID NO: 4980 - protein, 6 aa, synthetic construct
TAWVQT

SEQ ID NO: 4981 - protein, 6 aa, synthetic construct
TGAVQN

SEQ ID NO: 4982 - protein, 6 aa, synthetic construct
TGCFQN

SEQ ID NO: 4983 - protein, 6 aa, synthetic construct
TGGAQN

SEQ ID NO: 4984 - protein, 6 aa, synthetic construct
TGGFQN

SEQ ID NO: 4985 - protein, 6 aa, synthetic construct
TGGVLN

SEQ ID NO: 4986 - protein, 6 aa, synthetic construct
TGGVQH

SEQ ID NO: 4987 - protein, 6 aa, synthetic construct
TGGVQK

SEQ ID NO: 4988 - protein, 6 aa, synthetic construct
TGGVQT

SEQ ID NO: 4989 - protein, 6 aa, synthetic construct
TGPVQN

SEQ ID NO: 4990 - protein, 6 aa, synthetic construct
TGSAQN

SEQ ID NO: 4991 - protein, 6 aa, synthetic construct
TGSLQN

SEQ ID NO: 4992 - protein, 6 aa, synthetic construct
TGSVQH

SEQ ID NO: 4993 - protein, 6 aa, synthetic construct
TGSVQI

SEQ ID NO: 4994 - protein, 6 aa, synthetic construct
TGSVQS

SEQ ID NO: 4995 - protein, 6 aa, synthetic construct
TGSVQT

SEQ ID NO: 4996 - protein, 6 aa, synthetic construct
TGTVQN

SEQ ID NO: 4997 - protein, 6 aa, synthetic construct
TGWEQN

SEQ ID NO: 4998 - protein, 6 aa, synthetic construct
TGWFQN

SEQ ID NO: 4999 - protein, 6 aa, synthetic construct
TGWGQT

SEQ ID NO: 5000 - protein, 6 aa, synthetic construct
TGWVPN

SEQ ID NO: 5001 - protein, 6 aa, synthetic construct
TGWVQD

SEQ ID NO: 5002 - protein, 6 aa, synthetic construct
TGWVQP

SEQ ID NO: 5003 - protein, 6 aa, synthetic construct
TGWVQT

SEQ ID NO: 5004 - protein, 6 aa, synthetic construct
TGWVRN

SEQ ID NO: 5005 - protein, 6 aa, synthetic construct
TKAVQN

SEQ ID NO: 5006 - protein, 6 aa, synthetic construct
TKPVQN

SEQ ID NO: 5007 - protein, 6 aa, synthetic construct
TKQVQN

SEQ ID NO: 5008 - protein, 6 aa, synthetic construct
TKSVQN

SEQ ID NO: 5009 - protein, 6 aa, synthetic construct
TLPVQN

SEQ ID NO: 5010 - protein, 6 aa, synthetic construct
TLQVQN

SEQ ID NO: 5011 - protein, 6 aa, synthetic construct
TMAVQN

SEQ ID NO: 5012 - protein, 6 aa, synthetic construct
TMGVQN

SEQ ID NO: 5013 - protein, 6 aa, synthetic construct
TMKVQN

SEQ ID NO: 5014 - protein, 6 aa, synthetic construct
TMNVQN

SEQ ID NO: 5015 - protein, 6 aa, synthetic construct
TMPVQN

SEQ ID NO: 5016 - protein, 6 aa, synthetic construct
TMQVQN

SEQ ID NO: 5017 - protein, 6 aa, synthetic construct
TMSVKN

SEQ ID NO: 5018 - protein, 6 aa, synthetic construct
TMSVQN

SEQ ID NO: 5019 - protein, 6 aa, synthetic construct
TMSVQT

SEQ ID NO: 5020 - protein, 6 aa, synthetic construct
TMTVQN

SEQ ID NO: 5021 - protein, 6 aa, synthetic construct
TNAVQN

SEQ ID NO: 5022 - protein, 6 aa, synthetic construct
TNQVQN

SEQ ID NO: 5023 - protein, 6 aa, synthetic construct
TNSVQN

SEQ ID NO: 5024 - protein, 6 aa, synthetic construct
TPPVQN

SEQ ID NO: 5025 - protein, 6 aa, synthetic construct
TQHVQN

SEQ ID NO: 5026 - protein, 6 aa, synthetic construct
TQKVQN

SEQ ID NO: 5027 - protein, 6 aa, synthetic construct
TQMVQN

SEQ ID NO: 5028 - protein, 6 aa, synthetic construct
TQNVQN

SEQ ID NO: 5029 - protein, 6 aa, synthetic construct
TQPVQN

SEQ ID NO: 5030 - protein, 6 aa, synthetic construct
TQQVQN

SEQ ID NO: 5031 - protein, 6 aa, synthetic construct
TQTVQN

SEQ ID NO: 5032 - protein, 6 aa, synthetic construct
TRWDQN

SEQ ID NO: 5033 - protein, 6 aa, synthetic construct
TSAVQN

SEQ ID NO: 5034 - protein, 6 aa, synthetic construct
TSGVQN

SEQ ID NO: 5035 - protein, 6 aa, synthetic construct
TSHVQN

SEQ ID NO: 5036 - protein, 6 aa, synthetic construct
TSKVQN

SEQ ID NO: 5037 - protein, 6 aa, synthetic construct
TSLVQN

SEQ ID NO: 5038 - protein, 6 aa, synthetic construct
TSMVQN

SEQ ID NO: 5039 - protein, 6 aa, synthetic construct
TSPDQN

SEQ ID NO: 5040 - protein, 6 aa, synthetic construct
TSQVQN

SEQ ID NO: 5041 - protein, 6 aa, synthetic construct
TSSVQN

SEQ ID NO: 5042 - protein, 6 aa, synthetic construct
TSSVQT

SEQ ID NO: 5043 - protein, 6 aa, synthetic construct
TSTVQN

SEQ ID NO: 5044 - protein, 6 aa, synthetic construct
TSVVQN

SEQ ID NO: 5045 - protein, 6 aa, synthetic construct
TTAVQN

SEQ ID NO: 5046 - protein, 6 aa, synthetic construct
TTGVQN

SEQ ID NO: 5047 - protein, 6 aa, synthetic construct
TTKVQN

SEQ ID NO: 5048 - protein, 6 aa, synthetic construct
TTPVQN

SEQ ID NO: 5049 - protein, 6 aa, synthetic construct
TTPVQT

SEQ ID NO: 5050 - protein, 6 aa, synthetic construct
TTQVQN

SEQ ID NO: 5051 - protein, 6 aa, synthetic construct
TTTVQN

SEQ ID NO: 5052 - protein, 6 aa, synthetic construct
TVAVQN

SEQ ID NO: 5053 - protein, 6 aa, synthetic construct
TVAVQT

SEQ ID NO: 5054 - protein, 6 aa, synthetic construct
TVGVQN

SEQ ID NO: 5055 - protein, 6 aa, synthetic construct
TVQVQN

SEQ ID NO: 5056 - protein, 6 aa, synthetic construct
TVSVKN

SEQ ID NO: 5057 - protein, 6 aa, synthetic construct
TVWVQK

SEQ ID NO: 5058 - protein, 6 aa, synthetic construct
VAAVQN

SEQ ID NO: 5059 - protein, 6 aa, synthetic construct
VAGVQN

SEQ ID NO: 5060 - protein, 6 aa, synthetic construct
VAKVQN

SEQ ID NO: 5061 - protein, 6 aa, synthetic construct
VANVQN

SEQ ID NO: 5062 - protein, 6 aa, synthetic construct
VAQVQN

SEQ ID NO: 5063 - protein, 6 aa, synthetic construct
VASVQN

SEQ ID NO: 5064 - protein, 6 aa, synthetic construct
VATVQN

SEQ ID NO: 5065 - protein, 6 aa, synthetic construct
VGGVQN

SEQ ID NO: 5066 - protein, 6 aa, synthetic construct
VGKVQN

SEQ ID NO: 5067 - protein, 6 aa, synthetic construct
VGNVQN

SEQ ID NO: 5068 - protein, 6 aa, synthetic construct
VGSVQN

SEQ ID NO: 5069 - protein, 6 aa, synthetic construct
VHPVQN

SEQ ID NO: 5070 - protein, 6 aa, synthetic construct
VKAVQN

SEQ ID NO: 5071 - protein, 6 aa, synthetic construct
VKPVQN

SEQ ID NO: 5072 - protein, 6 aa, synthetic construct
VKQVQN

SEQ ID NO: 5073 - protein, 6 aa, synthetic construct
VLPVQN

SEQ ID NO: 5074 - protein, 6 aa, synthetic construct
VLSVQN

SEQ ID NO: 5075 - protein, 6 aa, synthetic construct
VMAVQN

SEQ ID NO: 5076 - protein, 6 aa, synthetic construct
VMQVQN

SEQ ID NO: 5077 - protein, 6 aa, synthetic construct
VMSVQN

SEQ ID NO: 5078 - protein, 6 aa, synthetic construct
VNAVQN

SEQ ID NO: 5079 - protein, 6 aa, synthetic construct
VNGVQN

SEQ ID NO: 5080 - protein, 6 aa, synthetic construct
VNSVQN

SEQ ID NO: 5081 - protein, 6 aa, synthetic construct
VQAVQN

SEQ ID NO: 5082 - protein, 6 aa, synthetic construct
VQNVQN

SEQ ID NO: 5083 - protein, 6 aa, synthetic construct
VQPVQN

SEQ ID NO: 5084 - protein, 6 aa, synthetic construct
VQQVQN

SEQ ID NO: 5085 - protein, 6 aa, synthetic construct
VQSVQN

SEQ ID NO: 5086 - protein, 6 aa, synthetic construct
VQTVQN

SEQ ID NO: 5087 - protein, 6 aa, synthetic construct
VRPVQN

SEQ ID NO: 5088 - protein, 6 aa, synthetic construct
VSAVQN

SEQ ID NO: 5089 - protein, 6 aa, synthetic construct
VSGVQN

SEQ ID NO: 5090 - protein, 6 aa, synthetic construct
VSNVQN

SEQ ID NO: 5091 - protein, 6 aa, synthetic construct
VSPVQT

SEQ ID NO: 5092 - protein, 6 aa, synthetic construct
VSQVQN

SEQ ID NO: 5093 - protein, 6 aa, synthetic construct
VSRVQN

SEQ ID NO: 5094 - protein, 6 aa, synthetic construct
VSSVQK

SEQ ID NO: 5095 - protein, 6 aa, synthetic construct
VSSVQT

SEQ ID NO: 5096 - protein, 6 aa, synthetic construct
VSTVQN

SEQ ID NO: 5097 - protein, 6 aa, synthetic construct
VTAVQN

SEQ ID NO: 5098 - protein, 6 aa, synthetic construct
VTGVQN

SEQ ID NO: 5099 - protein, 6 aa, synthetic construct
VTKVQN

SEQ ID NO: 5100 - protein, 6 aa, synthetic construct
VTPVQN

SEQ ID NO: 5101 - protein, 6 aa, synthetic construct
VTSVQN

SEQ ID NO: 5102 - protein, 6 aa, synthetic construct
TGLVQN

SEQ ID NO: 5103 - protein, 6 aa, synthetic construct
TGWVKN

SEQ ID NO: 5104 - protein, 6 aa, synthetic construct
PGWVQN

SEQ ID NO: 5105 - protein, 6 aa, synthetic construct
TGWVQH

SEQ ID NO: 5106 - protein, 6 aa, synthetic construct
LSGVQN

SEQ ID NO: 5107 - protein, 6 aa, synthetic construct
LSSVQN

SEQ ID NO: 5108 - protein, 6 aa, synthetic construct
LVPVQN

SEQ ID NO: 5109 - protein, 6 aa, synthetic construct
LSPVKN

SEQ ID NO: 5110 - protein, 7 aa, synthetic construct
PLNGAVN

SEQ ID NO: 5111 - protein, 7 aa, synthetic construct
PLNGAVQ

SEQ ID NO: 5112 - protein, 7 aa, synthetic construct
PLNGAIH

SEQ ID NO: 5113 - protein, 7 aa, synthetic construct
PLNGALH

SEQ ID NO: 5114 - protein, 7 aa, synthetic construct
PLNGAVP

SEQ ID NO: 5115 - protein, 7 aa, synthetic construct
PLNGAVD

SEQ ID NO: 5116 - protein, 7 aa, synthetic construct
PLNGAAH

SEQ ID NO: 5117 - protein, 7 aa, synthetic construct
PLNGAFH

SEQ ID NO: 5118 - protein, 7 aa, synthetic construct
PLNGADH

SEQ ID NO: 5119 - protein, 7 aa, synthetic construct
PLNGAVL

SEQ ID NO: 5120 - protein, 7 aa, synthetic construct
PLNGAGH

SEQ ID NO: 5121 - protein, 7 aa, synthetic construct
PLNGAVR

SEQ ID NO: 5122 - protein, 7 aa, synthetic construct
PLNGAVY

SEQ ID NO: 5123 - protein, 9 aa, synthetic construct
PLNGAVNLY

SEQ ID NO: 5124 - protein, 9 aa, synthetic construct
PLNGAVQLY

SEQ ID NO: 5125 - protein, 9 aa, synthetic construct
PLNGAIHLY

SEQ ID NO: 5126 - protein, 9 aa, synthetic construct
PLNGALHLY

SEQ ID NO: 5127 - protein, 9 aa, synthetic construct
PLNGAVPLY

SEQ ID NO: 5128 - protein, 9 aa, synthetic construct
PLNGAVDLY

SEQ ID NO: 5129 - protein, 9 aa, synthetic construct
PLNGAAHLY

SEQ ID NO: 5130 - protein, 9 aa, synthetic construct
PLNGAVHRY

SEQ ID NO: 5131 - protein, 9 aa, synthetic construct
PLNGAFHLY

SEQ ID NO: 5132 - protein, 9 aa, synthetic construct
PLNGADHLY

SEQ ID NO: 5133 - protein, 9 aa, synthetic construct
PLNGAVLLY

SEQ ID NO: 5134 - protein, 9 aa, synthetic construct
PLNGAGHLY

SEQ ID NO: 5135 - protein, 9 aa, synthetic construct
PLNGAVRLY

SEQ ID NO: 5136 - protein, 9 aa, synthetic construct
PLNGAVHVY

SEQ ID NO: 5137 - protein, 9 aa, synthetic construct
PLNGAVYLY

SEQ ID NO: 5138 - protein, 8 aa, synthetic construct
VHLYAHAQ

SEQ ID NO: 5139 - protein, 8 aa, synthetic construct
VNLYAQAQ

SEQ ID NO: 5140 - protein, 8 aa, synthetic construct
VQLYAQAQ

SEQ ID NO: 5141 - protein, 8 aa, synthetic construct
VHLYAQEQ

SEQ ID NO: 5142 - protein, 8 aa, synthetic construct
IHLYAQAQ

SEQ ID NO: 5143 - protein, 8 aa, synthetic construct
LHLYAQAQ

SEQ ID NO: 5144 - protein, 8 aa, synthetic construct
VPLYAQAQ

SEQ ID NO: 5145 - protein, 8 aa, synthetic construct
VHLYAQAK

SEQ ID NO: 5146 - protein, 8 aa, synthetic construct
VDLYAQAQ

SEQ ID NO: 5147 - protein, 8 aa, synthetic construct
AHLYAQAQ

SEQ ID NO: 5148 - protein, 8 aa, synthetic construct
VHRYAQAQ

SEQ ID NO: 5149 - protein, 8 aa, synthetic construct
FHLYAQAQ

SEQ ID NO: 5150 - protein, 8 aa, synthetic construct
VHLYALAQ

SEQ ID NO: 5151 - protein, 8 aa, synthetic construct
DHLYAQAQ

SEQ ID NO: 5152 - protein, 8 aa, synthetic construct
VHLYAPAQ

SEQ ID NO: 5153 - protein, 8 aa, synthetic construct
VHLYARAQ

SEQ ID NO: 5154 - protein, 8 aa, synthetic construct
VHLYAQAH

SEQ ID NO: 5155 - protein, 8 aa, synthetic construct
VLLYAQAQ

SEQ ID NO: 5156 - protein, 8 aa, synthetic construct
VHLYAQAP

SEQ ID NO: 5157 - protein, 8 aa, synthetic construct
GHLYAQAQ

SEQ ID NO: 5158 - protein, 8 aa, synthetic construct
VRLYAQAQ

SEQ ID NO: 5159 - protein, 8 aa, synthetic construct
VYLYAQAQ

SEQ ID NO: 5160 - protein, 8 aa, synthetic construct
VHLYTQAQ

SEQ ID NO: 5161 - protein, 11 aa, synthetic construct
PLNGAVHLYAH

SEQ ID NO: 5162 - protein, 11 aa, synthetic construct
PLNGAVNLYAQ

SEQ ID NO: 5163 - protein, 11 aa, synthetic construct
PLNGAVQLYAQ

SEQ ID NO: 5164 - protein, 11 aa, synthetic construct
PLNGAIHLYAQ

SEQ ID NO: 5165 - protein, 11 aa, synthetic construct
PLNGALHLYAQ

SEQ ID NO: 5166 - protein, 11 aa, synthetic construct
PLNGAVPLYAQ

SEQ ID NO: 5167 - protein, 11 aa, synthetic construct
PLNGAVDLYAQ

SEQ ID NO: 5168 - protein, 11 aa, synthetic construct
PLNGAAHLYAQ

SEQ ID NO: 5169 - protein, 11 aa, synthetic construct
PLNGAVHRYAQ

SEQ ID NO: 5170 - protein, 11 aa, synthetic construct
PLNGAFHLYAQ

SEQ ID NO: 5171 - protein, 11 aa, synthetic construct
PLNGAVHLYAL

SEQ ID NO: 5172 - protein, 11 aa, synthetic construct
PLNGADHLYAQ

SEQ ID NO: 5173 - protein, 11 aa, synthetic construct
PLNGAVHLYAP

SEQ ID NO: 5174 - protein, 11 aa, synthetic construct
PLNGAVHLYAR

SEQ ID NO: 5175 - protein, 11 aa, synthetic construct
PLNGAVLLYAQ

SEQ ID NO: 5176 - protein, 11 aa, synthetic construct
PLNGAGHLYAQ

SEQ ID NO: 5177 - protein, 11 aa, synthetic construct
PLNGAVRLYAQ

SEQ ID NO: 5178 - protein, 11 aa, synthetic construct
PLNGAVHVYAQ

SEQ ID NO: 5179 - protein, 11 aa, synthetic construct
PLNGAVYLYAQ

SEQ ID NO: 5180 - protein, 11 aa, synthetic construct
PLNGAVHLYTQ

SEQ ID NO: 5181 - protein, 13 aa, synthetic construct
PLNGAVHLYAHAQ

SEQ ID NO: 5182 - protein, 13 aa, synthetic construct
PLNGAVNLYAQAQ

SEQ ID NO: 5183 - protein, 13 aa, synthetic construct
PLNGAVQLYAQAQ

SEQ ID NO: 5184 - protein, 13 aa, synthetic construct
PLNGAVHLYAQEQ

SEQ ID NO: 5185 - protein, 13 aa, synthetic construct
PLNGAIHLYAQAQ

SEQ ID NO: 5186 - protein, 13 aa, synthetic construct
PLNGALHLYAQAQ

SEQ ID NO: 5187 - protein, 13 aa, synthetic construct
PLNGAVPLYAQAQ

SEQ ID NO: 5188 - protein, 13 aa, synthetic construct
PLNGAVHLYAQAK

SEQ ID NO: 5189 - protein, 13 aa, synthetic construct
PLNGAVDLYAQAQ

SEQ ID NO: 5190 - protein, 13 aa, synthetic construct
PLNGAAHLYAQAQ

SEQ ID NO: 5191 - protein, 13 aa, synthetic construct
PLNGAVHRYAQAQ

SEQ ID NO: 5192 - protein, 13 aa, synthetic construct
PLNGAFHLYAQAQ

SEQ ID NO: 5193 - protein, 13 aa, synthetic construct
PLNGAVHLYALAQ

SEQ ID NO: 5194 - protein, 13 aa, synthetic construct
PLNGADHLYAQAQ

SEQ ID NO: 5195 - protein, 13 aa, synthetic construct
PLNGAVHLYAPAQ

SEQ ID NO: 5196 - protein, 13 aa, synthetic construct
PLNGAVHLYARAQ

SEQ ID NO: 5197 - protein, 13 aa, synthetic construct
PLNGAVHLYAQAH

SEQ ID NO: 5198 - protein, 13 aa, synthetic construct
PLNGAVLLYAQAQ

SEQ ID NO: 5199 - protein, 13 aa, synthetic construct
PLNGAVHLYAQAP

SEQ ID NO: 5200 - protein, 13 aa, synthetic construct
PLNGAGHLYAQAQ

SEQ ID NO: 5201 - protein, 13 aa, synthetic construct
PLNGAVRLYAQAQ

SEQ ID NO: 5202 - protein, 13 aa, synthetic construct
PLNGAVHVYAQAQ

SEQ ID NO: 5203 - protein, 13 aa, synthetic construct
PLNGAVYLYAQAQ

SEQ ID NO: 5204 - protein, 13 aa, synthetic construct
PLNGAVHLYTQAQ

SEQ ID NO: 5205 - protein, 6 aa, synthetic construct
TMMVQN

SEQ ID NO: 5206 - protein, 6 aa, synthetic construct
TGGVQS

SEQ ID NO: 5207 - protein, 6 aa, synthetic construct
TGSFQN

SEQ ID NO: 5208 - protein, 6 aa, synthetic construct
RSVVQN

SEQ ID NO: 5209 - protein, 6 aa, synthetic construct
TGSVQK

SEQ ID NO: 5210 - protein, 6 aa, synthetic construct
TQLVQN

SEQ ID NO: 5211 - protein, 6 aa, synthetic construct
TGGVHN

SEQ ID NO: 5212 - protein, 6 aa, synthetic construct
RTPVQN

SEQ ID NO: 5213 - protein, 6 aa, synthetic construct
RQQVQN

SEQ ID NO: 5214 - protein, 6 aa, synthetic construct
TGSVRN

SEQ ID NO: 5215 - protein, 6 aa, synthetic construct
VQGVQN

SEQ ID NO: 5216 - protein, 6 aa, synthetic construct
PGWVQT

SEQ ID NO: 5217 - protein, 6 aa, synthetic construct
STQVQN

SEQ ID NO: 5218 - protein, 6 aa, synthetic construct
QSPVQN

SEQ ID NO: 5219 - protein, 6 aa, synthetic construct
RYSVQN

SEQ ID NO: 5220 - protein, 6 aa, synthetic construct
TQRVQN

SEQ ID NO: 5221 - protein, 6 aa, synthetic construct
SAGVQN

SEQ ID NO: 5222 - protein, 6 aa, synthetic construct
SAPVQT

SEQ ID NO: 5223 - protein, 6 aa, synthetic construct
RQSVQN

SEQ ID NO: 5224 - protein, 6 aa, synthetic construct
SQPVQN

SEQ ID NO: 5225 - protein, 6 aa, synthetic construct
VASVKN

SEQ ID NO: 5226 - protein, 6 aa, synthetic construct
TAWVRN

SEQ ID NO: 5227 - protein, 6 aa, synthetic construct
TGGGQN

SEQ ID NO: 5228 - protein, 6 aa, synthetic construct
STSVQN

SEQ ID NO: 5229 - protein, 6 aa, synthetic construct
VLGVQN

SEQ ID NO: 5230 - protein, 6 aa, synthetic construct
NQPVQN

SEQ ID NO: 5231 - protein, 6 aa, synthetic construct
LGTVQN

SEQ ID NO: 5232 - protein, 6 aa, synthetic construct
RAGVQN

SEQ ID NO: 5233 - protein, 6 aa, synthetic construct
TGGVKN

SEQ ID NO: 5234 - protein, 6 aa, synthetic construct
TAWLQN

SEQ ID NO: 5235 - protein, 6 aa, synthetic construct
TRWVQK

SEQ ID NO: 5236 - protein, 6 aa, synthetic construct
LAPVKN

SEQ ID NO: 5237 - protein, 6 aa, synthetic construct
TGSVQD

SEQ ID NO: 5238 - protein, 6 aa, synthetic construct
TGMVQN

SEQ ID NO: 5239 - protein, 6 aa, synthetic construct
LSNVQN

SEQ ID NO: 5240 - protein, 6 aa, synthetic construct
RLPVQN

SEQ ID NO: 5241 - protein, 6 aa, synthetic construct
RQGVQN

SEQ ID NO: 5242 - protein, 6 aa, synthetic construct
STPVQT

SEQ ID NO: 5243 - protein, 6 aa, synthetic construct
TTPVKN

SEQ ID NO: 5244 - protein, 6 aa, synthetic construct
RLTVQN

SEQ ID NO: 5245 - protein, 6 aa, synthetic construct
TLRVQN

SEQ ID NO: 5246 - protein, 6 aa, synthetic construct
SAFVQN

SEQ ID NO: 5247 - protein, 6 aa, synthetic construct
SVQVQN

SEQ ID NO: 5248 - protein, 6 aa, synthetic construct
LLPVQN

SEQ ID NO: 5249 - protein, 6 aa, synthetic construct
RTQVQN

SEQ ID NO: 5250 - protein, 6 aa, synthetic construct
TGSDQN

SEQ ID NO: 5251 - protein, 6 aa, synthetic construct
VASDQN

SEQ ID NO: 5252 - protein, 6 aa, synthetic construct
VSPVKN

SEQ ID NO: 5253 - protein, 6 aa, synthetic construct
LPPVQN

SEQ ID NO: 5254 - protein, 6 aa, synthetic construct
SSPVQT

SEQ ID NO: 5255 - protein, 6 aa, synthetic construct
AQPVQN

SEQ ID NO: 5256 - protein, 6 aa, synthetic construct
TPQVQN

SEQ ID NO: 5257 - protein, 6 aa, synthetic construct
TSWVQN

SEQ ID NO: 5258 - protein, 6 aa, synthetic construct
TGGDQN

SEQ ID NO: 5259 - protein, 6 aa, synthetic construct
SSPVKN

SEQ ID NO: 5260 - protein, 6 aa, synthetic construct
NTTVQN

SEQ ID NO: 5261 - protein, 6 aa, synthetic construct
TTRVQN

SEQ ID NO: 5262 - protein, 6 aa, synthetic construct
TQWVQN

SEQ ID NO: 5263 - protein, 6 aa, synthetic construct
TGSVHN

SEQ ID NO: 5264 - protein, 6 aa, synthetic construct
TGGLQN

SEQ ID NO: 5265 - protein, 6 aa, synthetic construct
TAWVQK

SEQ ID NO: 5266 - protein, 6 aa, synthetic construct
TGRVQT

SEQ ID NO: 5267 - protein, 6 aa, synthetic construct
NTQVQN

SEQ ID NO: 5268 - protein, 6 aa, synthetic construct
TGWLQN

SEQ ID NO: 5269 - protein, 6 aa, synthetic construct
TYAVQN

SEQ ID NO: 5270 - protein, 6 aa, synthetic construct
TLSVQN

SEQ ID NO: 5271 - protein, 6 aa, synthetic construct
NLPVQN

SEQ ID NO: 5272 - protein, 6 aa, synthetic construct
TSSDQN

SEQ ID NO: 5273 - protein, 6 aa, synthetic construct
ATSVQN

SEQ ID NO: 5274 - protein, 6 aa, synthetic construct
TAWFQN

SEQ ID NO: 5275 - protein, 6 aa, synthetic construct
ATQVQN

SEQ ID NO: 5276 - protein, 6 aa, synthetic construct
VSSVKN

SEQ ID NO: 5277 - protein, 6 aa, synthetic construct
TGSGQN

SEQ ID NO: 5278 - protein, 6 aa, synthetic construct
LQPVQT

SEQ ID NO: 5279 - protein, 6 aa, synthetic construct
VSAVKN

SEQ ID NO: 5280 - protein, 6 aa, synthetic construct
TQAVQN

SEQ ID NO: 5281 - protein, 6 aa, synthetic construct
TGWVQK

SEQ ID NO: 5282 - protein, 6 aa, synthetic construct
VMPVQN

SEQ ID NO: 5283 - protein, 6 aa, synthetic construct
TVSVQK

SEQ ID NO: 5284 - protein, 6 aa, synthetic construct
TAWAQN

SEQ ID NO: 5285 - protein, 6 aa, synthetic construct
NALVQN

SEQ ID NO: 5286 - protein, 6 aa, synthetic construct
RMLVQN

SEQ ID NO: 5287 - protein, 6 aa, synthetic construct
TVAVKN

SEQ ID NO: 5288 - protein, 6 aa, synthetic construct
RQLVQN

SEQ ID NO: 5289 - protein, 6 aa, synthetic construct
TLGVQN

SEQ ID NO: 5290 - protein, 6 aa, synthetic construct
LGPVQT

SEQ ID NO: 5291 - protein, 6 aa, synthetic construct
TGSVKN

SEQ ID NO: 5292 - protein, 6 aa, synthetic construct
TMSDQN

SEQ ID NO: 5293 - protein, 6 aa, synthetic construct
LASVKN

SEQ ID NO: 5294 - protein, 6 aa, synthetic construct
TGFVQN

SEQ ID NO: 5295 - protein, 6 aa, synthetic construct
SALVQN

SEQ ID NO: 5296 - protein, 6 aa, synthetic construct
TGWVKT

SEQ ID NO: 5297 - protein, 6 aa, synthetic construct
SQLVQN

SEQ ID NO: 5298 - protein, 6 aa, synthetic construct
TGWGQN

SEQ ID NO: 5299 - protein, 6 aa, synthetic construct
LSAVQN

SEQ ID NO: 5300 - protein, 6 aa, synthetic construct
TMQVQT

SEQ ID NO: 5301 - protein, 6 aa, synthetic construct
TGQVQN

SEQ ID NO: 5302 - protein, 6 aa, synthetic construct
TSPVKN

SEQ ID NO: 5303 - protein, 6 aa, synthetic construct
LSQVQT

SEQ ID NO: 5304 - protein, 6 aa, synthetic construct
TGSVLN

SEQ ID NO: 5305 - protein, 6 aa, synthetic construct
TNGVQN

SEQ ID NO: 5306 - protein, 6 aa, synthetic construct
TGWVKK

SEQ ID NO: 5307 - protein, 6 aa, synthetic construct
AAAVQN

SEQ ID NO: 5308 - protein, 6 aa, synthetic construct
SAVVQN

SEQ ID NO: 5309 - protein, 6 aa, synthetic construct
PGWVQH

SEQ ID NO: 5310 - protein, 6 aa, synthetic construct
TASDQN

SEQ ID NO: 5311 - protein, 6 aa, synthetic construct
SSRVQN

SEQ ID NO: 5312 - protein, 6 aa, synthetic construct
SPPVQN

SEQ ID NO: 5313 - protein, 6 aa, synthetic construct
VQPVQT

SEQ ID NO: 5314 - protein, 6 aa, synthetic construct
TSSVKN

SEQ ID NO: 5315 - protein, 6 aa, synthetic construct
LSPLQN

SEQ ID NO: 5316 - protein, 6 aa, synthetic construct
VSQVQK

SEQ ID NO: 5317 - protein, 6 aa, synthetic construct
LVGVQN

SEQ ID NO: 5318 - protein, 6 aa, synthetic construct
TLSVKN

SEQ ID NO: 5319 - protein, 6 aa, synthetic construct
TGWFQK

SEQ ID NO: 5320 - protein, 6 aa, synthetic construct
TPAVQN

SEQ ID NO: 5321 - protein, 6 aa, synthetic construct
TVGVKN

SEQ ID NO: 5322 - protein, 6 aa, synthetic construct
KGWDQN

SEQ ID NO: 5323 - protein, 6 aa, synthetic construct
TAWVLN

SEQ ID NO: 5324 - protein, 6 aa, synthetic construct
VPPVQN

SEQ ID NO: 5325 - protein, 6 aa, synthetic construct
ATGVQN

SEQ ID NO: 5326 - protein, 6 aa, synthetic construct
TGGVQI

SEQ ID NO: 5327 - protein, 6 aa, synthetic construct
TGWVLN

SEQ ID NO: 5328 - protein, 6 aa, synthetic construct
TAWGQN

SEQ ID NO: 5329 - protein, 6 aa, synthetic construct
TGWVHN

SEQ ID NO: 5330 - protein, 6 aa, synthetic construct
LGSVQT

SEQ ID NO: 5331 - protein, 6 aa, synthetic construct
SANVQN

SEQ ID NO: 5332 - protein, 6 aa, synthetic construct
TGGVQD

SEQ ID NO: 5333 - protein, 6 aa, synthetic construct
TMAVKN

SEQ ID NO: 5334 - protein, 6 aa, synthetic construct
TASVKN

SEQ ID NO: 5335 - protein, 6 aa, synthetic construct
SSPVQK

SEQ ID NO: 5336 - protein, 6 aa, synthetic construct
TGTVQT

SEQ ID NO: 5337 - protein, 6 aa, synthetic construct
TGWVQI

SEQ ID NO: 5338 - protein, 6 aa, synthetic construct
TVWVKN

SEQ ID NO: 5339 - protein, 6 aa, synthetic construct
SQQVQN

SEQ ID NO: 5340 - protein, 6 aa, synthetic construct
VGSVQT

SEQ ID NO: 5341 - protein, 6 aa, synthetic construct
SSMVQN

SEQ ID NO: 5342 - protein, 6 aa, synthetic construct
TSPVQK

SEQ ID NO: 5343 - protein, 6 aa, synthetic construct
AVGVQN

SEQ ID NO: 5344 - protein, 6 aa, synthetic construct
VAPVQN

SEQ ID NO: 5345 - protein, 6 aa, synthetic construct
TLPVQK

SEQ ID NO: 5346 - protein, 6 aa, synthetic construct
TGRVQH

SEQ ID NO: 5347 - protein, 6 aa, synthetic construct
TPSVQN

SEQ ID NO: 5348 - protein, 6 aa, synthetic construct
TGWVEN

SEQ ID NO: 5349 - protein, 6 aa, synthetic construct
RGWVQN

SEQ ID NO: 5350 - protein, 6 aa, synthetic construct
TGSVEN

SEQ ID NO: 5351 - protein, 6 aa, synthetic construct
SSLVQN

SEQ ID NO: 5352 - protein, 6 aa, synthetic construct
TAWVKN

SEQ ID NO: 5353 - protein, 6 aa, synthetic construct
TYSVQN

SEQ ID NO: 5354 - protein, 6 aa, synthetic construct
LAAVQT

SEQ ID NO: 5355 - protein, 6 aa, synthetic construct
TALVKN

SEQ ID NO: 5356 - protein, 6 aa, synthetic construct
TGWVQY

SEQ ID NO: 5357 - protein, 6 aa, synthetic construct
TLPVQT

SEQ ID NO: 5358 - protein, 6 aa, synthetic construct
TGLVQH

SEQ ID NO: 5359 - protein, 6 aa, synthetic construct
TPTVQN

SEQ ID NO: 5360 - protein, 6 aa, synthetic construct
TASVQK

SEQ ID NO: 5361 - protein, 6 aa, synthetic construct
TSPVQI

SEQ ID NO: 5362 - protein, 6 aa, synthetic construct
IGWVQN

SEQ ID NO: 5363 - protein, 6 aa, synthetic construct
TGWDKN

SEQ ID NO: 5364 - protein, 6 aa, synthetic construct
KSSVQN

SEQ ID NO: 5365 - protein, 6 aa, synthetic construct
TGYVQN

SEQ ID NO: 5366 - protein, 6 aa, synthetic construct
RGWVQT

SEQ ID NO: 5367 - protein, 6 aa, synthetic construct
RSLVQN

SEQ ID NO: 5368 - protein, 6 aa, synthetic construct
TGGVEN

SEQ ID NO: 5369 - protein, 6 aa, synthetic construct
TGCVRN

SEQ ID NO: 5370 - protein, 6 aa, synthetic construct
LSPVQS

SEQ ID NO: 5371 - protein, 6 aa, synthetic construct
TGPVQT

SEQ ID NO: 5372 - protein, 6 aa, synthetic construct
TVGVQK

SEQ ID NO: 5373 - protein, 6 aa, synthetic construct
TASGQN

SEQ ID NO: 5374 - protein, 6 aa, synthetic construct
SVSVQN

SEQ ID NO: 5375 - protein, 6 aa, synthetic construct
SGPVQT

SEQ ID NO: 5376 - protein, 6 aa, synthetic construct
VMSVKN

SEQ ID NO: 5377 - protein, 6 aa, synthetic construct
LGSVQK

SEQ ID NO: 5378 - protein, 6 aa, synthetic construct
TGLVLN

SEQ ID NO: 5379 - protein, 6 aa, synthetic construct
TSNVQN

SEQ ID NO: 5380 - protein, 6 aa, synthetic construct
TGWGHN

SEQ ID NO: 5381 - protein, 6 aa, synthetic construct
SQMVQN

SEQ ID NO: 5382 - protein, 6 aa, synthetic construct
TVSVHN

SEQ ID NO: 5383 - protein, 6 aa, synthetic construct
LSSVQT

SEQ ID NO: 5384 - protein, 6 aa, synthetic construct
TASVRN

SEQ ID NO: 5385 - protein, 6 aa, synthetic construct
VPAVQN

SEQ ID NO: 5386 - protein, 6 aa, synthetic construct
TGRVQK

SEQ ID NO: 5387 - protein, 6 aa, synthetic construct
AMSVQN

SEQ ID NO: 5388 - protein, 6 aa, synthetic construct
TAWVHN

SEQ ID NO: 5389 - protein, 6 aa, synthetic construct
TGLVRN

SEQ ID NO: 5390 - protein, 6 aa, synthetic construct
RTLVQT

SEQ ID NO: 5391 - protein, 6 aa, synthetic construct
TGSIQN

SEQ ID NO: 5392 - protein, 6 aa, synthetic construct
LSSVKN

SEQ ID NO: 5393 - protein, 6 aa, synthetic construct
TLQVQK

SEQ ID NO: 5394 - protein, 6 aa, synthetic construct
VGSVKN

SEQ ID NO: 5395 - protein, 6 aa, synthetic construct
LAPLQN

SEQ ID NO: 5396 - protein, 6 aa, synthetic construct
TPGVQN

SEQ ID NO: 5397 - protein, 6 aa, synthetic construct
LSAVQT

SEQ ID NO: 5398 - protein, 6 aa, synthetic construct
TGVVQN

SEQ ID NO: 5399 - protein, 6 aa, synthetic construct
VPQVQN

SEQ ID NO: 5400 - protein, 6 aa, synthetic construct
TGCVQK

SEQ ID NO: 5401 - protein, 6 aa, synthetic construct
TRWVQT

SEQ ID NO: 5402 - protein, 6 aa, synthetic construct
TGLDQN

SEQ ID NO: 5403 - protein, 6 aa, synthetic construct
VSSVHN

SEQ ID NO: 5404 - protein, 6 aa, synthetic construct
KGWVQT

SEQ ID NO: 5405 - protein, 6 aa, synthetic construct
SLPVQN

SEQ ID NO: 5406 - protein, 6 aa, synthetic construct
TTSVHN

SEQ ID NO: 5407 - protein, 6 aa, synthetic construct
TVWVQN

SEQ ID NO: 5408 - protein, 6 aa, synthetic construct
TAQLQN

SEQ ID NO: 5409 - protein, 6 aa, synthetic construct
TRWVKN

SEQ ID NO: 5410 - protein, 6 aa, synthetic construct
TAWIQN

SEQ ID NO: 5411 - protein, 6 aa, synthetic construct
LSQVKN

SEQ ID NO: 5412 - protein, 6 aa, synthetic construct
TSTVKN

SEQ ID NO: 5413 - protein, 6 aa, synthetic construct
ALPVQN

SEQ ID NO: 5414 - protein, 6 aa, synthetic construct
TSMVQT

SEQ ID NO: 5415 - protein, 6 aa, synthetic construct
TSSVQH

SEQ ID NO: 5416 - protein, 6 aa, synthetic construct
TAMVKN

SEQ ID NO: 5417 - protein, 6 aa, synthetic construct
TPWVQN

SEQ ID NO: 5418 - protein, 6 aa, synthetic construct
TPRVQN

SEQ ID NO: 5419 - protein, 6 aa, synthetic construct
SSSVQN

SEQ ID NO: 5420 - protein, 6 aa, synthetic construct
RPPVQN

SEQ ID NO: 5421 - protein, 6 aa, synthetic construct
LAGVKN

SEQ ID NO: 5422 - protein, 6 aa, synthetic construct
TSPAQN

SEQ ID NO: 5423 - protein, 6 aa, synthetic construct
RSPVQT

SEQ ID NO: 5424 - protein, 6 aa, synthetic construct
TGWVPH

SEQ ID NO: 5425 - protein, 6 aa, synthetic construct
PGWGQN

SEQ ID NO: 5426 - protein, 6 aa, synthetic construct
IPPVQN

SEQ ID NO: 5427 - protein, 6 aa, synthetic construct
TGRVKN

SEQ ID NO: 5428 - protein, 6 aa, synthetic construct
TGRLQN

SEQ ID NO: 5429 - protein, 6 aa, synthetic construct
LSSVQH

SEQ ID NO: 5430 - protein, 6 aa, synthetic construct
AGWVQT

SEQ ID NO: 5431 - protein, 6 aa, synthetic construct
TGLVQS

SEQ ID NO: 5432 - protein, 6 aa, synthetic construct
TGCVQI

SEQ ID NO: 5433 - protein, 6 aa, synthetic construct
RPGVQN

SEQ ID NO: 5434 - protein, 6 aa, synthetic construct
TAAVQH

SEQ ID NO: 5435 - protein, 6 aa, synthetic construct
TGCDQN

SEQ ID NO: 5436 - protein, 6 aa, synthetic construct
TGRVRN

SEQ ID NO: 5437 - protein, 6 aa, synthetic construct
TGRDQN

SEQ ID NO: 5438 - protein, 6 aa, synthetic construct
PLNGVK

SEQ ID NO: 5439 - protein, 6 aa, synthetic construct
PLNGAR

SEQ ID NO: 5440 - protein, 6 aa, synthetic construct
PLNGVR

SEQ ID NO: 5441 - protein, 6 aa, synthetic construct
PLNGTR

SEQ ID NO: 5442 - protein, 6 aa, synthetic construct
PLNGAK

SEQ ID NO: 5443 - protein, 6 aa, synthetic construct
PLNGVQ

SEQ ID NO: 5444 - protein, 6 aa, synthetic construct
PLNGAQ

SEQ ID NO: 5445 - protein, 6 aa, synthetic construct
PLNGAG

SEQ ID NO: 5446 - protein, 6 aa, synthetic construct
PLNGGV

SEQ ID NO: 5447 - protein, 7 aa, synthetic construct
PLNGVKA

SEQ ID NO: 5448 - protein, 7 aa, synthetic construct
PLNGARM

SEQ ID NO: 5449 - protein, 7 aa, synthetic construct
PLNGVKM

SEQ ID NO: 5450 - protein, 7 aa, synthetic construct
PLNGVRA

SEQ ID NO: 5451 - protein, 7 aa, synthetic construct
PLNGVRS

SEQ ID NO: 5452 - protein, 7 aa, synthetic construct
PLNGTRM

SEQ ID NO: 5453 - protein, 7 aa, synthetic construct
PLNGVRT

SEQ ID NO: 5454 - protein, 7 aa, synthetic construct
PLNGVRM

SEQ ID NO: 5455 - protein, 7 aa, synthetic construct
PLNGAKM

SEQ ID NO: 5456 - protein, 7 aa, synthetic construct
PLNGVKS

SEQ ID NO: 5457 - protein, 7 aa, synthetic construct
PLNGVQM

SEQ ID NO: 5458 - protein, 7 aa, synthetic construct
PLNGTRS

SEQ ID NO: 5459 - protein, 7 aa, synthetic construct
PLNGVRQ

SEQ ID NO: 5460 - protein, 7 aa, synthetic construct
PLNGAQM

SEQ ID NO: 5461 - protein, 7 aa, synthetic construct
PLNGVKY

SEQ ID NO: 5462 - protein, 7 aa, synthetic construct
PLNGART

SEQ ID NO: 5463 - protein, 7 aa, synthetic construct
PLNGAGA

SEQ ID NO: 5464 - protein, 7 aa, synthetic construct
PLNGVQA

SEQ ID NO: 5465 - protein, 7 aa, synthetic construct
PLNGVKT

SEQ ID NO: 5466 - protein, 7 aa, synthetic construct
PLNGGVH

SEQ ID NO: 5467 - protein, 4 aa, synthetic construct
VKAL

SEQ ID NO: 5468 - protein, 4 aa, synthetic construct
ARMI

SEQ ID NO: 5469 - protein, 4 aa, synthetic construct
VKML

SEQ ID NO: 5470 - protein, 4 aa, synthetic construct
VRAL

SEQ ID NO: 5471 - protein, 4 aa, synthetic construct
VRSL

SEQ ID NO: 5472 - protein, 4 aa, synthetic construct
TRML

SEQ ID NO: 5473 - protein, 4 aa, synthetic construct
VRTL

SEQ ID NO: 5474 - protein, 4 aa, synthetic construct
VRML

SEQ ID NO: 5475 - protein, 4 aa, synthetic construct
ARML

SEQ ID NO: 5476 - protein, 4 aa, synthetic construct
AKML

SEQ ID NO: 5477 - protein, 4 aa, synthetic construct
VKSL

SEQ ID NO: 5478 - protein, 4 aa, synthetic construct
VQML

SEQ ID NO: 5479 - protein, 4 aa, synthetic construct
TRSL

SEQ ID NO: 5480 - protein, 4 aa, synthetic construct
VRQL

SEQ ID NO: 5481 - protein, 4 aa, synthetic construct
AQML

SEQ ID NO: 5482 - protein, 4 aa, synthetic construct
VKYL

SEQ ID NO: 5483 - protein, 4 aa, synthetic construct
ARTI

SEQ ID NO: 5484 - protein, 4 aa, synthetic construct
AGAD

SEQ ID NO: 5485 - protein, 4 aa, synthetic construct
VQAL

SEQ ID NO: 5486 - protein, 4 aa, synthetic construct
VKTL

SEQ ID NO: 5487 - protein, 4 aa, synthetic construct
GVHL

SEQ ID NO: 5488 - protein, 4 aa, synthetic construct
AGHL

SEQ ID NO: 5489 - protein, 5 aa, synthetic construct
VKALY

SEQ ID NO: 5490 - protein, 5 aa, synthetic construct
ARMIY

SEQ ID NO: 5491 - protein, 5 aa, synthetic construct
VKMLY

SEQ ID NO: 5492 - protein, 5 aa, synthetic construct
VRALY

SEQ ID NO: 5493 - protein, 5 aa, synthetic construct
VRSLY

SEQ ID NO: 5494 - protein, 5 aa, synthetic construct
TRMLY

SEQ ID NO: 5495 - protein, 5 aa, synthetic construct
VRTLY

SEQ ID NO: 5496 - protein, 5 aa, synthetic construct
VRMLY

SEQ ID NO: 5497 - protein, 5 aa, synthetic construct
ARMLY

SEQ ID NO: 5498 - protein, 5 aa, synthetic construct
AKMLY

SEQ ID NO: 5499 - protein, 5 aa, synthetic construct
VKSLY

SEQ ID NO: 5500 - protein, 5 aa, synthetic construct
VQMLY

SEQ ID NO: 5501 - protein, 5 aa, synthetic construct
TRSLY

SEQ ID NO: 5502 - protein, 5 aa, synthetic construct
VRQLY

SEQ ID NO: 5503 - protein, 5 aa, synthetic construct
AQMLY

SEQ ID NO: 5504 - protein, 5 aa, synthetic construct
VKYLY

SEQ ID NO: 5505 - protein, 5 aa, synthetic construct
ARTIY

SEQ ID NO: 5506 - protein, 5 aa, synthetic construct
AGADY

SEQ ID NO: 5507 - protein, 5 aa, synthetic construct
VQALY

SEQ ID NO: 5508 - protein, 5 aa, synthetic construct
VKTLY

SEQ ID NO: 5509 - protein, 5 aa, synthetic construct
GVHLS

SEQ ID NO: 5510 - protein, 5 aa, synthetic construct
AGHLN

SEQ ID NO: 5511 - protein, 8 aa, synthetic construct
PLNGVKAL

SEQ ID NO: 5512 - protein, 8 aa, synthetic construct
PLNGARMI

SEQ ID NO: 5513 - protein, 8 aa, synthetic construct
PLNGVKML

SEQ ID NO: 5514 - protein, 8 aa, synthetic construct
PLNGVRAL

SEQ ID NO: 5515 - protein, 8 aa, synthetic construct
PLNGVRSL

SEQ ID NO: 5516 - protein, 8 aa, synthetic construct
PLNGTRML

SEQ ID NO: 5517 - protein, 8 aa, synthetic construct
PLNGVRTL

SEQ ID NO: 5518 - protein, 8 aa, synthetic construct
PLNGVRML

SEQ ID NO: 5519 - protein, 8 aa, synthetic construct
PLNGARML

SEQ ID NO: 5520 - protein, 8 aa, synthetic construct
PLNGAKML

SEQ ID NO: 5521 - protein, 8 aa, synthetic construct
PLNGVKSL

SEQ ID NO: 5522 - protein, 8 aa, synthetic construct
PLNGVQML

SEQ ID NO: 5523 - protein, 8 aa, synthetic construct
PLNGTRSL

SEQ ID NO: 5524 - protein, 8 aa, synthetic construct
PLNGVRQL

SEQ ID NO: 5525 - protein, 8 aa, synthetic construct
PLNGAQML

SEQ ID NO: 5526 - protein, 8 aa, synthetic construct
PLNGVKYL

SEQ ID NO: 5527 - protein, 8 aa, synthetic construct
PLNGARTI

SEQ ID NO: 5528 - protein, 8 aa, synthetic construct
PLNGAGAD

SEQ ID NO: 5529 - protein, 8 aa, synthetic construct
PLNGVQAL

SEQ ID NO: 5530 - protein, 8 aa, synthetic construct
PLNGVKTL

SEQ ID NO: 5531 - protein, 8 aa, synthetic construct
PLNGGVHL

SEQ ID NO: 5532 - protein, 8 aa, synthetic construct
PLNGAGHL

SEQ ID NO: 5533 - protein, 9 aa, synthetic construct
PLNGVKALY

SEQ ID NO: 5534 - protein, 9 aa, synthetic construct
PLNGARMIY

SEQ ID NO: 5535 - protein, 9 aa, synthetic construct
PLNGVKMLY

SEQ ID NO: 5536 - protein, 9 aa, synthetic construct
PLNGVRALY

SEQ ID NO: 5537 - protein, 9 aa, synthetic construct
PLNGVRSLY

SEQ ID NO: 5538 - protein, 9 aa, synthetic construct
PLNGTRMLY

SEQ ID NO: 5539 - protein, 9 aa, synthetic construct
PLNGVRTLY

SEQ ID NO: 5540 - protein, 9 aa, synthetic construct
PLNGVRMLY

SEQ ID NO: 5541 - protein, 9 aa, synthetic construct
PLNGARMLY

SEQ ID NO: 5542 - protein, 9 aa, synthetic construct
PLNGAKMLY

SEQ ID NO: 5543 - protein, 9 aa, synthetic construct
PLNGVKSLY

SEQ ID NO: 5544 - protein, 9 aa, synthetic construct
PLNGVQMLY

SEQ ID NO: 5545 - protein, 9 aa, synthetic construct
PLNGTRSLY

SEQ ID NO: 5546 - protein, 9 aa, synthetic construct
PLNGVRQLY

SEQ ID NO: 5547 - protein, 9 aa, synthetic construct
PLNGAQMLY

SEQ ID NO: 5548 - protein, 9 aa, synthetic construct
PLNGVKYLY

SEQ ID NO: 5549 - protein, 9 aa, synthetic construct
PLNGARTIY

SEQ ID NO: 5550 - protein, 9 aa, synthetic construct
PLNGAGADY

SEQ ID NO: 5551 - protein, 9 aa, synthetic construct
PLNGVQALY

SEQ ID NO: 5552 - protein, 9 aa, synthetic construct
PLNGVKTLY

SEQ ID NO: 5553 - protein, 9 aa, synthetic construct
PLNGGVHLS

SEQ ID NO: 5554 - protein, 9 aa, synthetic construct
PLNGAGHLN

SEQ ID NO: 5555 - protein, 4 aa, synthetic construct
KALY

SEQ ID NO: 5556 - protein, 4 aa, synthetic construct
KMLY

SEQ ID NO: 5557 - protein, 4 aa, synthetic construct
RALY

SEQ ID NO: 5558 - protein, 4 aa, synthetic construct
RSLY

SEQ ID NO: 5559 - protein, 4 aa, synthetic construct
RMLY

SEQ ID NO: 5560 - protein, 4 aa, synthetic construct
RTLY

SEQ ID NO: 5561 - protein, 4 aa, synthetic construct
KSLY

SEQ ID NO: 5562 - protein, 4 aa, synthetic construct
QMLY

SEQ ID NO: 5563 - protein, 4 aa, synthetic construct
RQLY

SEQ ID NO: 5564 - protein, 4 aa, synthetic construct
KYLY

SEQ ID NO: 5565 - protein, 4 aa, synthetic construct
QALY

SEQ ID NO: 5566 - protein, 4 aa, synthetic construct
KTLY

SEQ ID NO: 5567 - protein, 5 aa, synthetic construct
PGHLY

SEQ ID NO: 5568 - protein, 5 aa, synthetic construct
PVHLY

SEQ ID NO: 5569 - protein, 5 aa, synthetic construct
VGHLY

SEQ ID NO: 5570 - protein, 5 aa, synthetic construct
TGHLY

SEQ ID NO: 5571 - protein, 7 aa, synthetic construct
NNPGHLY

SEQ ID NO: 5572 - protein, 7 aa, synthetic construct
NGVKALY

SEQ ID NO: 5573 - protein, 7 aa, synthetic construct
NGVKMLY

SEQ ID NO: 5574 - protein, 7 aa, synthetic construct
NGVRALY

SEQ ID NO: 5575 - protein, 7 aa, synthetic construct
NGVRSLY

SEQ ID NO: 5576 - protein, 7 aa, synthetic construct
NGTRMLY

SEQ ID NO: 5577 - protein, 7 aa, synthetic construct
NGVRTLY

SEQ ID NO: 5578 - protein, 7 aa, synthetic construct
NGVRMLY

SEQ ID NO: 5579 - protein, 7 aa, synthetic construct
NGARMLY

SEQ ID NO: 5580 - protein, 7 aa, synthetic construct
NGAKMLY

SEQ ID NO: 5581 - protein, 7 aa, synthetic construct
NGVKSLY

SEQ ID NO: 5582 - protein, 7 aa, synthetic construct
NGVQMLY

SEQ ID NO: 5583 - protein, 7 aa, synthetic construct
ARAVHLY

SEQ ID NO: 5584 - protein, 7 aa, synthetic construct
NGTRSLY

SEQ ID NO: 5585 - protein, 7 aa, synthetic construct
NGVRQLY

SEQ ID NO: 5586 - protein, 7 aa, synthetic construct
NGAQMLY

SEQ ID NO: 5587 - protein, 7 aa, synthetic construct
NGVKYLY

SEQ ID NO: 5588 - protein, 7 aa, synthetic construct
NMPGHLY

SEQ ID NO: 5589 - protein, 7 aa, synthetic construct
NGVQALY

SEQ ID NO: 5590 - protein, 7 aa, synthetic construct
NGVKTLY

SEQ ID NO: 5591 - protein, 7 aa, synthetic construct
NGPVHLY

SEQ ID NO: 5592 - protein, 7 aa, synthetic construct
NLVGHLY

SEQ ID NO: 5593 - protein, 7 aa, synthetic construct
NLTGHLY

SEQ ID NO: 5594 - protein, 7 aa, synthetic construct
RQAVHLY

SEQ ID NO: 5595 - protein, 9 aa, synthetic construct
PLNNPGHLY

SEQ ID NO: 5596 - protein, 9 aa, synthetic construct
PSARAVHLY

SEQ ID NO: 5597 - protein, 9 aa, synthetic construct
PLNMPGHLY

SEQ ID NO: 5598 - protein, 9 aa, synthetic construct
SINGPVHLY

SEQ ID NO: 5599 - protein, 9 aa, synthetic construct
PLNLVGHLY

SEQ ID NO: 5600 - protein, 9 aa, synthetic construct
PLNLTGHLY

SEQ ID NO: 5601 - protein, 9 aa, synthetic construct
PGRQAVHLY

We claim:

1. An AAV capsid variant, comprising an amino sequence comprising the following formula: [N1]-[N2], wherein:
(i) [N1] comprises X1, X2, X3, X4, and X5, wherein:
(a) position X1 is: P, Q, A, H, K, L, R, S, or T;
(b) position X2 is: L, I, V, H, or R;
(c) position X3 is: N, D, I, K, or Y;
(d) position X4 is: G, A, C, R, or S; and
(e) position X5 is: A, S, T, G, C, D, N, Q, V, or Y; and
(ii) [N2] comprises the amino acid sequence of VHLY (SEQ ID NO: 4680), VHIY (SEQ ID NO: 4681), VHVY (SEQ ID NO: 4682), or VHHY (SEQ ID NO: 4683); or a substitution, e.g., a conservative substitution, of any of the aforesaid amino acids in (i) and/or (ii);
wherein [N1]-[N2] is present from N-terminus to C-terminus, immediately subsequent to position 586, numbered according to any one of SEQ ID NO: 5, 8, or 3636; and
wherein the AAV capsid variant further comprises one, two, or all of (a)-(c):
(a) the amino acid L, T, V, R, S, A, C, I, K, M, N, P, or Q at position 600, the amino acid S, G, A, T, M, V, Q, L, H, I, K, N, P, R, or Y at position 601, and the amino P, W, S, G, A, Q, L, M, K, C, E, F, H, R, T, V, or Y at position 602, numbered according to the amino acid sequence of SEQ ID NO: 5, 8, 3636, wherein the AAV capsid variant does not comprise the amino acid sequence TGW at position 600-602, numbered according to SEQ ID NO: 5, 8, or 3636;
(b) the amino acid V, D, F, G, L, A, E, or I at position 603, the amino acid K, P, Q, R, H, E, or L at position 604, and the amino acid N, T, K, H, D, Y, S, I, or P, numbered according to the amino acid sequence of SEQ ID NO: 5, 8, or 3636, wherein the AAV capsid variant does not comprise the amino acid sequence VQN at position 603-605, numbered according to SEQ ID NO: 5, 8, or 3636; and/or
(c) one, two, three, four, or all of an amino acid other then P at position X1, an amino acid other than L at position X2, an amino acid other than N at position X3, an amino acid other than G at position X4, or an amino acid other than A at position X5.

2. The AAV capsid variant of claim 1, wherein [N1] comprises PLNGA (SEQ ID NO: 3679), SLNGA (SEQ ID NO: 4684), QLNGA (SEQ ID NO: 4685), ALNGA (SEQ ID NO: 4686), PLNGS (SEQ ID NO: 4687), PVNGA (SEQ ID NO: 4688), PLNGG (SEQ ID NO: 4689), PLNGT (SEQ ID NO: 4690), PLDGA (SEQ ID NO: 4691), QLNGS (SEQ ID NO: 4692), PLNGN (SEQ ID NO: 4693), SLDGA (SEQ ID NO: 4694), HLNGA (SEQ ID NO: 4695), ALNGT (SEQ ID NO: 4696), PINGA (SEQ ID NO: 4697), ALDGA (SEQ ID NO: 4698), PLNCA (SEQ ID NO: 4699), PLNGQ (SEQ ID NO: 4700), PLDSA (SEQ ID NO: 4701), RLDGA (SEQ ID NO: 4702), QLNGN (SEQ ID NO: 4703), PLNGY (SEQ ID NO: 4704), PLDSS (SEQ ID NO: 4705), PLNGC (SEQ ID NO: 4706), PLYGA (SEQ ID NO: 4707), TLNGA (SEQ ID NO: 4708), PVDGA (SEQ ID NO: 4709), PLKGA (SEQ ID NO: 4710), PLNGD (SEQ ID NO: 4711), KLDGA (SEQ ID NO: 4712), PHNGA (SEQ ID NO: 4713), PLNGV (SEQ ID NO: 4714), PLNAA (SEQ ID NO: 4715), QLNGY (SEQ ID NO: 4716), PLDGS (SEQ ID NO: 4717), LLNGA (SEQ ID NO: 4718), PLNRA (SEQ ID NO: 4719), PLIGA (SEQ ID NO: 4720), PRNGA (SEQ ID NO: 4721), or ALNGS (SEQ ID NO: 4722), or a substitution, e.g., a conservative substitution, of any of the aforesaid amino acid sequences.

3. The AAV capsid variant of claim 1 or 2, wherein [N1]-[N2] comprises:
(i)
(SEQ ID NO: 3648)
PLNGAVHLY,
(SEQ ID NO: 4780)
ALDGAVHLY,
(SEQ ID NO: 4781)
ALNGAVHLY,
(SEQ ID NO: 4782)
PINGAVHLY,
(SEQ ID NO: 4783)
PLDGAVHLY,
(SEQ ID NO: 4784)
PLDSAVHLY,
(SEQ ID NO: 4785)
PLDSSVHLY,
(SEQ ID NO: 4786)
PLNGGVHLY,
(SEQ ID NO: 4787)
PLNGNVHLY,
(SEQ ID NO: 4788)
PLNGSVHLY,
(SEQ ID NO: 4789)
PLNGTVHLY,
(SEQ ID NO: 4790)
QLNGAVHLY,
(SEQ ID NO: 4791)
SLDGAVHLY,
(SEQ ID NO: 4792)
SLNGAVHLY,
(SEQ ID NO: 4793)
TLNGAVHLY,
(SEQ ID NO: 4794)
PLNGAVHIY,
(SEQ ID NO: 4795)
PLDGAVHVY,
or
(SEQ ID NO: 4796)
PLNGAVHHY;
(ii) an amino acid sequence comprising any portion of an amino acid sequence in (i), e.g., any 2, 3, 4, 5, 6, 7, or 8 amino acids, e.g., consecutive amino acids, thereof;
(iii) an amino acid sequence comprising at least one, two, or three but no more than four substitutions (e.g., conservative substitutions), relative to any of the amino acid sequences in (i); or
(iv) an amino acid sequence comprising at least one, two, or three but no more than four different amino acids, relative to any one of the amino acid sequences in (i)
4. The AAV capsid variant of any one of claims 1-3, which further comprises [N3], wherein [N3] comprises X6, X7, X8, and X9, wherein:
(a) position X6 is: A, D, S, or T;
(b) position X7 is: Q, K, H, L, P, or R;
(c) position X8 is: A, P, E, or R; and
(d) position X9 is: Q, H, K, or P; or a substitution, e.g., a conservative substitution, of any of the aforesaid amino acids in (a)-(d).

5. The AAV capsid variant of claim 4, wherein [N3] comprises AQAQ (SEQ ID NO: 4737), SQAQ (SEQ ID NO: 4738), AQPQ (SEQ ID NO: 4739), AQSQ (SEQ ID NO: 4740), AKAQ (SEQ ID NO: 4741), AHAQ (SEQ ID NO: 4742), AQAP (SEQ ID NO: 4743), DQAQ (SEQ ID NO: 4744), APAQ (SEQ ID NO: 4745), AQAK (SEQ ID NO: 4746), AQAH (SEQ ID NO: 4747), AQEQ (SEQ ID NO: 4748), ALAQ (SEQ ID NO: 4749), ARAQ (SEQ ID NO: 4750), or TQAQ (SEQ ID NO: 4751), or a substitution, e.g., a conservative substitution, of any of the aforesaid amino acid sequences.

6. The AAV capsid variant of any one of claims 1-5, which further comprises [N4], wherein [N4] comprises X10, X11, and X12, wherein:
(a) position X10 is: L, T, V, R, S, A, C, I, K, M, N, P, or Q;
(b) position X11 is: S, G, A, T, M, V, Q, L, H, I, K, N, P, R, or Y; and
(c) position X12 is: P, W, S, G, A, Q, L, M, K, C, E, F, H, R, T, V, or Y; or a substitution, e.g., a conservative substitution, of any of the aforesaid amino acids in (a)-(c).

7. The AAV capsid variant of claim 6, wherein [N4] comprises:
(i) LSP, TGW, TGL, TGS, TGG, TAW, TGR, TAS, LSS, TSS, SSL, SSS, TLS, TVS, VSS, TSP, VSP, TMS, VAS, TAL, TTS, TLP, VLP, RGW, LSG, LAS, SSP, LLP, STS, TSA, TTP, SAL, LGS, VTP, VSA, IGW, TGF, LTP, TLA, LSA, TVG, TAP, TMP, TSL, VQS, SSM, SLP, VSQ, RSS, TST, VMS, TTA, TQP, LST, LAP, TVA, RLS, TGY, TSG, TAG, VMP, TSQ, TMA, VGS, TSW, TGV, TGT, TLG, LMP, VQP, TGM, SMS, SQL, IGS, RSV, TAA, STP, LSQ, TAQ, TGP, ASP, VSG, SAP, TLQ, LQP, TAT, TGQ, ATS, IGG, VAA, TSM, TVW, TAM, TGA, VAT, QSP, TQA, VQA, RSP, LAT, VAQ, LAA, RST, RTL, LGT, LMS, LGP, RTS, SQP, VLG, SVS, TMQ, SAV, LAG, SGP, TNS, RLT, TTQ, SAA, TSV, RLG, RAS, STQ, CSP, SAG, ALP, VTS, ISP, SVG, LTS, TTT, RSG, TQL, LNP, TVQ, IAS, LAQ, LSR, LSN, TTG, TSN, SMA, TKS, SVA, TQQ, VQQ, RLP, SAM, TAV, TQW, SSR, TQT, VNS, RSA, LMG, RQS, LVG, VTA, RTT, SMG, VMA, TKP, SAQ, NSP, ATP, VAG, RGS, VKP, RMS, NLP, NAL, RTP, RQL, VQG, VTG, VST, NAS, RVE, ATG, AMS, RNS, VMQ, SMQ, LQQ, TMG, LGQ, TSH, AAP, RSQ, TYS, ITP, VAK, TQM, TKA, SQQ, ISG, VSR, RTA, RML, SQM, VAN, CTP, ISS, AGP, TAK, RTG, LHP, TMT, AQP, QAP, RQP, LKS, NTT, TSK, RYS, KSS, NTP, VGG, IAA, LMA, MAP, VHP, VLS, LAN, ATQ, TNA, TAN, VSN, AAA, AVG, LTA, SAN, RAG, RQG, TLR, LSH, SAF, RAA, IQP, ILG, VNG, SVQ, LSK, TNG, RTQ, TMN, RGG, TTR, VRP, VKA, LAR, NQP, TMK, TYA, TQK, TTK, IAG, TQN, LAH, NTQ, RQQ, RAQ, TKQ, TQH, TNQ, LMQ, VNA, VQT, TQR, VGK, VKQ, IQS, LQR, TMM, VGN, RIG, SAK, RIA, VQN, NVQ, RIP, NAQ, NMQ, TPS, LTN, VTK, PGW, LPP, SPP, TPA, TGC, VPP, TPT, TPW, TPP, RPP, TPQ, TPR, TPG, VPA, VPQ, RPG, KGW, TRW, TAR, IPP, RSL, LVP, KGS, VAP, KGG, KAW, PGS, TRL, or AGW, or a substitution, e.g., a conservative substitution, of any of the aforesaid amino acid sequences;
(ii) LSP; or
(iii) TGW.

8. The AAV capsid variant of any one of claims 1-7, which further comprises [N5], wherein [N5] comprises X13, X14, and X15, wherein:
(a) position X13 is: V, D, F, G, L, A, E, or I;
(b) position X14 is: K, P Q, R, H, E, or L; and
(c) position X15 is: N, T, K, H, D, Y, S, I, or P; or a substitution, e.g., a conservative substitution, of any of the aforesaid amino acids in (a)-(c).

9. The AAV capsid variant of claim 8, wherein [N5] comprises:
(i) VQN, VPN, VKN, VQT, VQK, DQN, VQH, GQN, VQI, VHN, FQN, LQN, VLN, VRN, VQS, VQY, AQN, VEN, VQD, IQN, VKK, DKN, VKT, VQP, EQN, GQT, FQK, GHN, or VPH, or a substitution, e.g., a conservative substitution, of any of the aforesaid amino acid sequences;
(ii) VKN, VPN, VEN, or VHN; or
(iii) VQN.

10. The AAV capsid variant of claim 8 or 9, wherein [N1]-[N2]-[N3]-[N4]-[N5] comprises:
(i) the amino acid sequence of any of SEQ ID NOs: 139-475 or 477-1138;
(ii) the amino acid sequence of PLNGAVHLYAQAQLSPVKN (SEQ ID NO: 566);
(iii) the amino acid sequence of PLNGAVHLYAQAQTGWVPN (SEQ ID NO: 314);
(iv) the amino acid sequence of any of SEQ ID NOs: 14-17, 40-136, 314, 325, 491, 499, 529, 558, 566, 576, 603, 610, 625, 631, 648, 649, 700, 703, 720, 755, 763, 765, 771, 791, 804, 816, 818, 819, 828, 859, 864, 871, 885, 946, 960, 966, 978, 979, 1016, 1033, 1032, 1037, 1058, 1081, 1100, 1122, or 1174-1193;
(v) an amino acid sequence comprising any portion of an amino acid sequence in (i)-(iv), e.g., any 2, 3, 4, 5, 6, 7, 8, 9, 10, 11, 12, 13, 14, 15, 16, 17, or 18 amino acids, e.g., consecutive amino acids, thereof;
(vi) an amino acid sequence comprising at least one, two, or three but no more than four substitutions (e.g., conservative substitutions), relative to any of the amino acid sequences in (i)-(iv); or
(vii) an amino acid sequence comprising at least one, two, or three but no more than four different amino acids, relative to any one of the amino acid sequences in (i)-(iv).

11. The AAV capsid variant of any one of claims 8-10, which comprises from N-terminus to C-terminus [N1]-[N2]-[N3]-[N4]-[N5], wherein:
(i) [N1] is present immediately subsequent to position 586, and replaces positions 587 and 588 (e.g., A587 and Q588), numbered according to SEQ ID NO: 138;
(ii) [N2] is present immediately subsequent to [N1];
(iii) [N3] is present immediately subsequent to position 588, and replaces positions 589-592 (e.g., A589, Q590, A591, Q592), numbered according to the amino acid sequence of SEQ ID NO: 138;
(iv) [N4] is present immediately subsequent to position 592, and replaces positions 593-595 (e.g., T593, G594, W595), numbered according to the amino acid sequence of SEQ ID NO: 138;
(v) [N5] is present immediately subsequent to position 595, and replaces positions 596-598 (e.g., V596, Q597, N598), numbered according to the amino acid sequence of SEQ ID NO: 138; and/or
(vi) [N1]-[N2]-[N3]-[N4]-[N5] is present immediately subsequent to position 586 and replaces positions 587-598 (e.g., A587, Q588, A589, Q590, A591, Q592, T593, G594, W595, V596, Q597, N598), numbered according to SEQ ID NO: 138.

12. The AAV capsid variant of any one of claims 8-11, wherein:
(i) the AAV capsid variant comprises an amino acid other than A at position 587 and/or an amino acid other than Q at position 588, numbered according to SEQ ID NO: 138;
(ii) [N1] corresponds to positions 587-591 of SEQ ID NO: 5, 8, or 3636;
(iii) [N2] corresponds to positions 592 to 595 of SEQ ID NO: 5, 8, or 3636;
(iv) [N3] corresponds to positions 596-599 of SEQ ID NO: 5, 8, or 3636;
(v) [N4] corresponds to positions 600-602 of SEQ ID NO: 5, 8, or 3636;
(vi) [N5] corresponds to positions 603-605 of SEQ ID NO: 5, 8, or 3636; and/or
(vii) [N1]-[N2]-[N3]-[N4]-[N5] corresponds to positions 587-605 of SEQ ID NO: 5, 8, or 3636.

13. An AAV capsid variant comprising [A][B], wherein [A] comprises the amino acid sequence of PLNGA (SEQ ID NO: 3679), and [B] comprises X1, X2, X3, X4, wherein:
(i) X1 is: V, I, L, A, F, D, or G;
(ii) X2 is: H, N, Q, P, D, L, R, or Y;
(iii) X3 is: L, H, I, R, or V; and
(iv) X4 is Y; or wherein the AAV capsid variant comprises a substitution e.g., a conservative substitution, of any of the aforesaid amino acids in (i)-(iv);
wherein [N1]-[N2] is present from N-terminus to C-terminus, immediately subsequent to position 586, numbered according to any one of SEQ ID NO: 5, 8, 138, or 3636; and
wherein the AAV capsid variant further comprises one, two, or all of (a)-(c):
(a) the amino acid L, T, V, S, R, I, A, N, C, Q, M, P, or K at position 600, the amino acid S, G, T, M, A, K, Q, V, I, R, N, P, L, H, or Y at position 601, and/or the amino acid P, W, K, Q, S, C, A, G, N, T, R, V, M, H, L, E, F, or Y at position 602, numbered according to the amino acid sequence of SEQ ID NO: 5, 8, 3636, wherein the AAV capsid variant does not comprise the amino acid sequence TGW at position 600-602, numbered according to SEQ ID NO: 5, 8, or 3636;
(b) the amino acid V, D, F, A, E, L, G, or I at position 603, the amino acid K, P, Q, R, L, H, or E at position 604, and/or the amino acid N, H, S, T, P, K, I, D, or Y at position 605, numbered according to the amino acid sequence of SEQ ID NO: 5, 8, or 3636, wherein the AAV capsid variant does not comprise the amino acid sequence VQN at position 603-605, numbered according to SEQ ID NO: 5, 8, or 3636; and/or
(c) one, two, three, or all of an amino acid other than V at position X1, an amino acid other than H at position X2, an amino acid other than L at position X3, and/or Y at position X4.

14. The AAV capsid variant of claim 13, wherein [B] is or comprises:
(i) VHLY (SEQ ID NO: 4680), VHHY (SEQ ID NO: 4683), VHIY (SEQ ID NO: 4681), VNLY (SEQ ID NO: 4724), VQLY (SEQ ID NO: 4729), IHLY (SEQ ID NO: 4730), LHLY (SEQ ID NO: 4727), VPLY (SEQ ID NO: 4723), VDLY (SEQ ID NO: 4731), AHLY (SEQ ID NO: 4732), VHRY (SEQ ID NO: 4725), FHLY (SEQ ID NO: 4726), DHLY (SEQ ID NO: 4728), VLLY (SEQ ID NO: 4733), GHLY (SEQ ID NO: 4734), VRLY (SEQ ID NO: 4735), VHVY (SEQ ID NO: 4682), or VYLY (SEQ ID NO: 4736), or a substitution, e.g., a conservative substitution, of any of the aforesaid amino acid sequences; or
(ii) VHLY (SEQ ID NO: 4680).

15. The AAV capsid variant of claim 13 or 14, wherein [A][B] comprises:
(i)
(SEQ ID NO: 3648)
PLNGAVHLY,
(SEQ ID NO: 4796)
PLNGAVHHY,
(SEQ ID NO: 4794)
PLNGAVHIY,
(SEQ ID NO: 5123)
PLNGAVNLY,
(SEQ ID NO: 5124)
PLNGAVQLY,
(SEQ ID NO: 5125)
PLNGAIHLY,
(SEQ ID NO: 5126)
PLNGALHLY,
(SEQ ID NO: 5127)
PLNGAVPLY,
(SEQ ID NO: 5128)
PLNGAVDLY,
(SEQ ID NO: 5129)
PLNGAAHLY,
(SEQ ID NO: 5130)
PLNGAVHRY,
(SEQ ID NO: 5131)
PLNGAFHLY,
(SEQ ID NO: 5132)
PLNGADHLY,
(SEQ ID NO: 5133)
PLNGAVLLY,
(SEQ ID NO: 5134)
PLNGAGHLY,
(SEQ ID NO: 5135)
PLNGAVRLY,
(SEQ ID NO: 5136)
PLNGAVHVY,
or
(SEQ ID NO: 5137)
PLNGAVYLY;
(ii)
(SEQ ID NO: 3648)
PLNGAVHLY;
(iii) an amino acid sequence comprising any portion of an amino acid sequence in (i) or (ii), e.g., any 2, 3, 4, 5, 6, 7, or 8 amino acids, e.g., consecutive amino acids, thereof;
(iv) an amino acid sequence comprising at least one, two, or three but no more than four substitutions (e.g., conservative substitutions), relative to any of the amino acid sequences in (i) or (ii); or
(v) an amino acid sequence comprising at least one, two, or three but no more than four different amino acids, relative to any one of the amino acid sequences in (i) or (ii).

16. The AAV capsid variant of any one of claims 13-15, which further comprises [C], wherein [C] comprises X4, X5, X6, and X7, wherein:
(a) position X4 is: A, D, S, or T;
(b) position X5 is: Q, K, H, L, P, or R;
(c) position X6 is: A, P, or E; and
(d) position X7 is: Q, H, K, or P;
or a substitution, e.g., a conservative substitution, of any of the aforesaid amino acids in (a)-(d).

17. The AAV capsid variant of claim 16, wherein [C] is or comprises:
(i) AQAQ (SEQ ID NO: 4737), AQPQ (SEQ ID NO: 4739), AKAQ (SEQ ID NO: 4741), DQAQ (SEQ ID NO: 4744), SQAQ (SEQ ID NO: 4738), AHAQ (SEQ ID NO: 4742), AQEQ (SEQ ID NO: 4748), AQAK (SEQ ID NO: 4746), ALAQ (SEQ ID NO: 4749), APAQ (SEQ ID NO: 4745), ARAQ (SEQ ID NO: 4750), AQAH (SEQ ID NO: 4747), AQAP (SEQ ID NO: 4743), or TQAQ (SEQ ID NO: 4751), or a substitution, e.g., a conservative substitution, of any of the aforesaid amino acid sequences; or
(ii) AQAQ (SEQ ID NO: 4737).

18. The AAV capsid variant of any one of claims 1-17, which further comprises:
(i) the amino acid L at position 593 numbered according to SEQ ID NO: 138 or at position 600 numbered according to SEQ ID NO: 5, 8, or 3636; the amino acid S at position 594 numbered according to SEQ ID NO: 138, or at position 601 numbered according to SEQ ID NO: 5, 8, or 3636; and the amino acid P at position 595 numbered according to SEQ ID NO: 138 or at position 602 numbered according to SEQ ID NO: 5, 8, or 3636; or
(ii) the amino acid T at position 593 numbered according to SEQ ID NO: 138 or at position 600 numbered according to SEQ ID NO: 5, 8, or 3636; the amino acid G at position 594 numbered according to SEQ ID NO: 138, or at position 601 numbered according to SEQ ID NO: 5, 8, or 3636; and the amino acid W at position 595 numbered according to SEQ ID NO: 138 or at position 602 numbered according to SEQ ID NO: 5, 8, or 3636.

19. The AAV capsid variant of any one of claims 13-18, which further comprises [D], wherein [D] comprises X8, X9, and X10, wherein:
(a) position X8 is: L, T, V, S, R, I, A, N, C, Q, M, P, or K;
(b) position X9 is: S, G, T, M, A, K, Q, V, I, R, N, P, L, H, or Y; and
(c) position X10 is: P, W, K, Q, S, C, A, G, N, T, R, V, M, H, L, E, F, or Y; or a substitution, e.g., a conservative substitution, of any of the aforesaid amino acids in (a)-(c).

20. The AAV capsid variant of any one of claims 13-19, wherein [D] is or comprises:
(i) LSP, TGW, TTK, TMK, VAQ, TAW, TGS, VKQ, SAP, LSK, LAP, LAQ, TAK, SAK, TGC, TQK, TVA, TTQ, TAQ, RIA, RAS, TTP, LTP, STP, TSP, TMQ, TSK, VSQ, VSP, TVQ, VTA, RQP, ISG, VRP, LGP, TNQ, VQQ, VAN, AAP, RST, TMA, IQP, IAS, TVS, RGS, NSP, LQP, VTG, VMQ, SMA, VGK, IQS, CSP, LQR, TPP, VTK, SSP, AGP, LAR, TTT, TGG, TLQ, TMS, VAK, RAA, TVG, LNP, LSQ, TKP, TNA, LAT, VTP, VQA, TTS, CTP, TAG, TSQ, TMN, TST, VKP, ASP, VAA, LKS, IAA, TAA, TKA, VSN, TAP, LMP, LHP, RAQ, LTN, RTT, TSV, RMS, VGN, LMQ, TAT, VHP, ISS, VAS, TRW, TMT, RSS, RTG, VAT, VTS, VSS, TNS, VKA, SGP, TGP, TAM, TQP, TQQ, VSR, VSA, VLS, TQH, LAS, QAP, NAQ, ATP, VQP, TTA, LAA, RSG, LMA, TMP, LAN, VST, SAQ, NTP, TGL, TAV, RLG, RTL, TQM, ITP, TVW, RSA, TAS, TMG, VQS, ISP, VGG, TAL, LAG, RTA, RSP, TLA, LAH, TSL, RLS, LMG, SMQ, TQT, VGS, VSG, VMA, IGG, IAG, TGR, LSH, VQT, RNS, TLP, TKQ, LGQ, NMQ, NVQ, RGG, VMS, TTG, LSR, MAP, ILG, TGT, TSS, TSH, RIG, SAM, TSM, SMG, SMS, TSG, TGA, VNS, VAG, IGS, LGS, VNG, LTA, VQN, TKS, SVG, NAS, TSA, TAN, LTS, RSQ, RIP, RVE, VLP, SVA, LQQ, LST, SAA, RTS, TQN, VNA, LMS, TMM, RSV, TQL, RTP, RQQ, VQG, PGW, STQ, QSP, RYS, TQR, SAG, RQS, SQP, STS, VLG, NQP, LGT, RAG, TGM, LSN, RLP, RQG, RLT, TLR, SAF, SVQ, LLP, RTQ, LPP, AQP, TPQ, TSW, NTT, TTR, TQW, NTQ, TYA, TLS, NLP, ATS, ATQ, LSS, TQA, VMP, NAL, RML, RQL, TLG, TGF, SAL, SQL, LSA, TGQ, TNG, AAA, SAV, LSG, SSR, SPP, LVG, TPA, KGW, VPP, ATG, SAN, SQQ, SSM, AVG, VAP, TPS, RGW, SSL, TYS, TPT, IGW, KSS, TGY, RSL, SVS, TSN, SQM, VPA, AMS, TPG, TGV, VPQ, SLP, ALP, TPW, TPR, SSS, RPP, IPP, AGW, or RPG, or a substitution, e.g., a conservative substitution, of any of the aforesaid amino acid sequences;
(ii) LSP; or
(iii) TGW.

21. The AAV capsid variant of any one of claims 1-20, wherein the AAV capsid variant further comprises:
(i) the amino acid V at position 596 numbered according to SEQ ID NO: 138 or at position 603 numbered according to SEQ ID NO: 5, 8, or 3636; the amino acid K, P, E or H at position 597 numbered according to SEQ ID NO: 138 or at position 604 numbered according to SEQ ID NO: 5, 8, or 3636; and the amino acid N at position 598 numbered according to the amino acid sequence of SEQ ID NO: 138 or at position 605 numbered according to SEQ ID NO: 5, 8, or 3636;
(ii) the amino acid V at position 596 numbered according to SEQ ID NO: 138 or at position 603 numbered according to SEQ ID NO: 5, 8, or 3636; the amino acid K at position 597 numbered according to SEQ ID NO: 138 or at position 604 numbered according to SEQ ID NO: 5, 8, or 3636; and the amino acid N at position 598 numbered according to the amino acid sequence of SEQ ID NO: 138 or at position 605 numbered according to SEQ ID NO: 5, 8, or 3636;
(iii) the amino acid V at position 596 numbered according to SEQ ID NO: 138 or at position 603 numbered according to SEQ ID NO: 5, 8, or 3636; the amino acid P at position 597 numbered according to SEQ ID NO: 138 or at position 604 numbered according to SEQ ID NO: 5, 8, or 3636; and the amino acid N at position 598 numbered according to the amino acid sequence of SEQ ID NO: 138 or at position 605 numbered according to SEQ ID NO: 5, 8, or 3636; or
(iv) the amino acid V at position 596 numbered according to SEQ ID NO: 138 or at position 603 numbered according to SEQ ID NO: 5, 8, or 3636; the amino acid Q at position 597 numbered according to SEQ ID NO: 138 or at position 604 numbered according to SEQ ID NO: 5, 8, or 3636; and the amino acid N at position 598 numbered according to the amino acid sequence of SEQ ID NO: 138 or at position 605 numbered according to SEQ ID NO: 5, 8, or 3636.

22. The AAV capsid variant of any one of claims 13-21, which further comprises [E], wherein [E] comprises X11, X12, and X13, wherein:
(a) position X11 is: V, D, F, A, E, L, G, or I;
(b) position X12 is: K, P, Q, R, L, H, or E; and
(c) position X13 is: N, H, S, T, P, K, I, D, or Y; or a substitution, e.g., a conservative substitution, of any of the aforesaid amino acids in (a)-(c).

23. The AAV capsid variant of claim 22, wherein [E] comprises:
(i) VQN, DQN, VQH, FQN, VQS, VQT, VQP, VRN, VPN, VKN, AQN, VQK, EQN, VQI, LQN, GQT, VLN, VQD, VHN, GQN, VKT, VKK, FQK, VEN, VQY, DKN, GHN, IQN, or VPH, or a substitution, e.g., a conservative substitution, of any of the aforesaid amino acid sequences; or
(ii) VKN, VPN, or VQN.

24. The AAV capsid variant of claim 22 or 23, wherein [A][B][C][D][E] comprises:
(i) the amino acid sequence of any of SEQ ID NOs: 143, 148, 149, 151, 153, 154-158, 160-163, 166, 168, 170, 171, 173-175, 177-179, 181, 182, 184-188, 191-197, 199-210, 212-215, 217-225, 227-231, 233, 234, 236-240, 243-262, 265, 267, 268, 270-277, 279, 282, 284-286, 288-293, 295, 296, 298, 300-314, 316-327, 329, 331, 332, 334, 336, 337-344, 346-350, 352-354, 356-365, 367, 369, 371-380, 382-385, 387, 392-394, 396, 397, 399-401, 404-411, 413-415, 417, 419-429, 432, 433, 435-437, 438, 440-442, 444-447, 450-454, 456, 458-461, 464, 465, 467-469, 471-475, 477-484, 487-495, 497, 498, 500-503, 505, 507-512, 514-517, 522-525, 528-539, 542-545, 547, 551-555, 558-561, 563-568, 570, 573, 574, 576, 579, 581, 582, 584, 586, 587, 591-596, 598, 601, 604, 605, 606, 607, 610, 612, 614-619, 624-629, 631-636, 640, 641, 645, 646, 649, 650, 656, 658, 661, 663, 664, 666, 668, 669, 670, 672, 673, 674, 675, 677, 679, 683, 684, 686, 688, 689, 691, 693, 695, 696, 697, 699, 700, 701, 702, 704-706, 709-714, 720, 722, 725-731, 733, 736, 740, 745, 749-752, 754, 755, 757, 758, 760-765, 767, 768, 770, 771, 773, 778-780, 783-788, 792-794, 797-799, 801, 802, 804-806, 812, 814, 815, 817, 818, 820, 821, 824, 828, 831, 832, 834-837, 839, 840-845, 847, 848, 850-855, 857-859, 861, 862, 865, 866, 869-872, 874-876, 882-884, 887, 889-895, 897, 899, 901, 903-905, 907, 908, 910, 911, 913, 915, 919, 920, 923, 924, 926, 927, 929, 931-933, 935, 937, 939-949, 952-955, 957, 958, 960, 962, 964, 965, 967, 971, 973, 974, 976, 977, 981, 985-989, 992, 994, 997-1000, 1002, 1004, 1006-1008, 1010, 1013, 1015, 1017, 1018, 1020, 1021, 1023-1025, 1027, 1029-1031, 1033-1035, 1037-1040, 1043, 1046, 1049, 1052, 1053, 1056, 1057, 1059, 1062, 1064, 1065, 1067, 1068, 1070, 1073, 1075, 1077-1080, 1083-1087, 1089, 1090, 1093, 1094, 1097, 1100, 1101, 1103, 1105-1107, 1110-1112, 1114-1117, 1119, 1121, 1125, 1126, 1129, 1132, 1133, 1135;
(ii)
(SEQ ID NO: 566)
PLNGAVHLYAQAQLSPVKN;
(iii)
(SEQ ID NO: 314)
PLNGAVHLYAQAQTGWVPN;
(iv) an amino acid sequence comprising any portion of an amino acid sequence in (i)-(iii), e.g., any 2, 3, 4, 5, 6, 7, 8, 9, 10, 11, 12, 13, 14, 15, 16, 17, or 18 amino acids, e.g., consecutive amino acids, thereof;
(v) an amino acid sequence comprising at least one, two, or three but no more than four substitutions (e.g., conservative substitutions), relative to any of the amino acid sequences in (i)-(iii); or
(vi) an amino acid sequence comprising at least one, two, or three but no more than four different amino acids, relative to any one of the amino acid sequences in (i)-(iii).

25. The AAV capsid variant of any one of claims 22-24, which comprises from N-terminus to C-terminus [A][B][C][D][E], wherein:
(i) [A] is present immediately subsequent to position 586, and replaces positions 587 and 588 (e.g., A587 and Q588), numbered according to SEQ ID NO: 138;
(ii) [B] is present immediately subsequent to [A];
(iii) [C] is present immediately subsequent to position 588, and replaces positions 589-592 (e.g., A589, Q590, A591, Q592), numbered according to the amino acid sequence of SEQ ID NO: 138;
(iv) [D] is present immediately subsequent to position 592, and replaces positions 593-595 (e.g., T593, G594, W595), numbered according to the amino acid sequence of SEQ ID NO: 138;
(v) [E] is present immediately subsequent to position 595, and replaces positions 596-598 (e.g., V596, Q597, N598), numbered according to the amino acid sequence of SEQ ID NO: 138; and/or
(vi) [A][B][C][D][E] is present immediately subsequent to position 586 and replaces positions 587-598 (e.g., A587, Q588, A589, Q590, A591, Q592, T593, G594, W595, V596, Q597, N598), numbered according to SEQ ID NO: 138.

26. The AAV capsid variant of any one of claims 22-25, wherein:
(i) the AAV capsid variant comprises an amino acid other than A at position 587 and/or an amino acid other than Q at position 588, numbered according to SEQ ID NO: 138;
(ii) [A] corresponds to positions 587-591 of SEQ ID NO: 5, 8, or 3636;
(iii) [B] corresponds to positions 592 to 595 of SEQ ID NO: 5, 8, or 3636;
(iv) [C] corresponds to positions 596-599 of SEQ ID NO: 5, 8, or 3636;
(v) [D] corresponds to positions 600-602 of SEQ ID NO: 5, 8, or 3636;
(vi) [E] corresponds to positions 603-605 of SEQ ID NO: 5, 8, or 3636; and/or
(vii) [A][B][C][D][E] corresponds to positions 587-605 of SEQ ID NO: 5, 8, or 3636.

27. The AAV capsid variant of any one of claims 1-26, which comprises:
(i) the amino acid sequence corresponding to positions 203-743, e.g., a VP3, of SEQ ID NO: 8, or a sequence with at least 90%, 95%, 96%, 97%, 98%, or 99% sequence identity thereto
(ii) the amino acid sequence corresponding to positions 138-743, e.g., a VP2, of SEQ ID NO: 8, or a sequence with at least 90%, 95%, 96%, 97%, 98%, or 99% sequence identity thereto;
(iii) the amino acid sequence of SEQ ID NO: 8 (e.g., a VP1), or an amino acid sequence with at least 90%, 95%, 96%, 97%, 98%, or 99% sequence identity thereto;
(iv) an amino acid sequence comprising at least one, two or three modifications, e.g., substitutions (e.g., conservative substitutions), but not more than 30, 20 or 10 modifications, e.g., substitutions (e.g., conservative substitutions), relative to the amino acid sequence of SEQ ID NO: 8; and/or
(v) an amino acid sequence comprising at least one, two or three, but not more than 30, 20 or 10 different amino acids, relative to the amino acid sequence of SEQ ID NO: 8.

28. The AAV capsid variant of any one of claims 1-26, which comprises:
(i) the amino acid sequence corresponding to positions 203-743, e.g., a VP3, of SEQ ID NO: 5, or a sequence with at least 90%, 95%, 96%, 97%, 98%, or 99% sequence identity thereto
(ii) the amino acid sequence corresponding to positions 138-743, e.g., a VP2, of SEQ ID NO: 5, or a sequence with at least 90%, 95%, 96%, 97%, 98%, or 99% sequence identity thereto;
(iii) the amino acid sequence of SEQ ID NO: 5 (e.g., a VP1), or an amino acid sequence with at least 90%, 95%, 96%, 97%, 98%, or 99% sequence identity thereto;
(iv) an amino acid sequence comprising at least one, two or three modifications, e.g., substitutions (e.g., conservative substitutions), but not more than 30, 20 or 10 modifications, e.g., substitutions (e.g., conservative substitutions), relative to the amino acid sequence of SEQ ID NO: 5; and/or
(v) an amino acid sequence comprising at least one, two or three, but not more than 30, 20 or 10 different amino acids, relative to the amino acid sequence of SEQ ID NO: 5.

29. An AAV capsid variant comprising the amino acid P at position 587, the amino acid L at position 588, and the amino acid sequence NGAVHLY (SEQ ID NO: 3689), which is present immediately subsequent to position 588, numbered according to SEQ ID NO: 8; and
wherein the AAV capsid variant further comprises
(a) a VP1 protein comprising the amino acid sequence of SEQ ID NO: 8;
(b) a VP2 protein comprising the amino acid sequence of positions 138-743 of SEQ ID NO: 8;
(c) a VP3 protein comprising the amino acid sequence of positions 203-743 of SEQ ID NO: 8; or
(d) an amino acid sequence with at least 90% (e.g., at least about 95, 96, 97, 98, or 99%) sequence identity to any of the amino acid sequences in (a)-(c); and
wherein the AAV capsid variant does not comprise the amino acid sequence TGW at positions 600-603, numbered according to SEQ ID NO: 8; or the amino acid sequence VQN at positions 603-605, numbered according to SEQ ID NO: 8.

30. An AAV capsid variant comprising the amino acid P at position 587, the amino acid L at position 588, and the amino acid sequence NGAVHLY (SEQ ID NO: 3689), which is present immediately subsequent to position 588, numbered according to SEQ ID NO: 5; and
wherein the AAV capsid variant further comprises
(a) a VP1 protein comprising the amino acid sequence of SEQ ID NO: 5;
(b) a VP2 protein comprising the amino acid sequence of positions 138-743 of SEQ ID NO: 5;
(c) a VP3 protein comprising the amino acid sequence of positions 203-743 of SEQ ID NO: 5; or
(d) an amino acid sequence with at least 90% (e.g., at least about 95, 96, 97, 98, or 99%) sequence identity to any of the amino acid sequences in (a)-(c); and
wherein the AAV capsid variant does not comprise the amino acid sequence TGW at positions 600-603, numbered according to SEQ ID NO: 5; or the amino acid sequence VQN at positions 603-605, numbered according to SEQ ID NO: 5.

31. A polynucleotide encoding the AAV capsid variant of any one of claims 1-30.

32. The polynucleotide of claim 31 which comprises the nucleotide sequence of SEQ ID NO: 4 or 7, or a nucleotide sequence with at least 90% (e.g., at least about 95, 96, 97, 98, or 99%) sequence identity to SEQ ID NO: 4 or 7.

33. A peptide comprising:
(a) the amino acid sequence of any of the sequences provided in Tables 1A, 1B, 10, or 20;
(b) an amino acid sequence comprising at least 3, 4, 5, 6, 7, 8, 9, 10, 11, 12, 13, 14, 15, 16, 17, 18, 19, 20 consecutive amino acids from any one of the sequences provided in Tables 1A, 1B, 10, or 20;
(c) an amino acid sequence comprising at least one, two, or three but no more than four different amino acids relative to the amino acid sequence of any one of the sequences provided in Tables 1A, 1B, 10, or 20; or
(d) an amino acid sequence comprising at least one, two, or three but no more than four modifications, e.g., substitutions (e.g., conservative substitutions), relative to the amino acid sequence of any one of the sequences provided in Tables 1A, 1B, 10, or 20;
wherein the peptide, e.g., at 1-5 peptides, e.g., at least 1, 2, 3, 4, or 5 peptides, are fused or coupled, e.g., conjugated, to an active agent, e.g., a therapeutic agent or a diagnostic agent, optionally wherein:
(i) the at least 1-5, e.g., at least 1, 2, 3, 4, or 5, peptides are present in tandem (e.g., connected directly or indirectly via a linker) or in a multimeric configuration;
(ii) the peptide comprises an amino acid sequence of at least 3, 4, 5, 6, 7, 8, 9, 10, 11, 12, 15, 20, 25, 30, or 35 amino acids in length;
(iii) the peptide is present N-terminal relative to the active agent;
(iv) the peptide is present C-terminal relative to the active agent;
(v) the active agent is or comprises a therapeutic agent chosen from a protein (e.g., an enzyme), an antibody molecule, a nucleic acid molecule (e.g., an RNAi agent), or a small molecule;
(vi) the active agent is or comprises a ribonucleic acid complex (e.g., a Cas9/gRNA complex), a plasmid, a closed-end DNA, a circ-RNA, or an mRNA;
(vii) the active agent is an RNAi agent (e.g., a dsRNA, a siRNA, a shRNA, a pre-miRNA, a pri-miRNA, a miRNA, a stRNA, a lncRNA, a piRNA, an antisense oligonucleotide agent (ASO), or a snoRNA, optionally wherein the RNAi agent is an siRNA or an ASO, which optionally comprises at least one modified nucleotide);
(viii) the active agent modulates, e.g., inhibits, decreases or increases, expression of, a CNS related gene, mRNA, and/or protein; and/or
(ix) the active agent is a diagnostic agent is or comprises an imaging agent (e.g., a protein or small molecule compound coupled to a detectable moiety).

34. An AAV particle comprising the AAV capsid variant of any one of claims 1-30, or an AAV capsid variant encoded by the polynucleotide of claim 31 or 32.

35. The AAV particle of claim 34, which comprises a nucleotide sequence encoding a payload, optionally wherein the encoded payload comprises a therapeutic protein or functional variant thereof; an antibody or antibody fragment; an enzyme; a component of a gene editing system; an RNAi agent (e.g., a dsRNA, siRNA, shRNA, pre-miRNA, pri-miRNA, miRNA, stRNA, lncRNA, piRNA, or snoRNA); or a combination thereof.

36. The AAV particle of claim 35, wherein:
(i) the therapeutic protein or functional variant thereof, e.g., a recombinant protein, is associated with (e.g., aberrantly expressed in) a neurological or neurodegenerative disorder, a muscular or neuromuscular disorder, or a neuro-oncological disorder, optionally wherein the therapeutic protein or functional variant thereof is chosen from apolipoprotein E (APOE) (e.g., ApoE2, ApoE3 and/or ApoE4); human survival of motor neuron (SMN) 1 or SMN2; glucocerebrosidase (GBA1); aromatic L-amino acid decarboxylase (AADC); aspartoacylase (ASPA); tripeptidyl peptidase I (CLN2); beta-galactosidase (GLB1); N-sulphoglucosamine sulphohydrolase (SGSH); N-acetyl-alpha-glucosaminidase (NAGLU); iduronate 2-sulfatase (IDS); intracellular cholesterol transporter (NPC1); gigaxonin (GAN); or a combination thereof;
(ii) the antibody or antibody binding fragment binds to
(a) a CNS related target, e.g. an antigen associated with a neurological or neurodegenerative disorder, e.g., β-amyloid, APOE, tau, SOD1, TDP-43, huntingtin (HTT), and/or synuclein;
(b) a muscular or neuromuscular related target, e.g., an antigen associated with a muscular or neuromuscular disorder; or
(c) a neuro-oncology related target, e.g., an antigen associated with a neuro-oncological disorder, e.g., HER2, or EGFR (e.g., EGFRvIII);
(iii) the enzyme comprises a meganuclease, a zinc finger nuclease, a TALEN, a recombinase, integrase, a base editor, a Cas9, or a fragment thereof;
(iv) the component of a gene editing system comprises one or more components of a CRISPR-Cas system, optionally wherein the one or more components of the CRISPR-Cas system comprises a Cas9, e.g., a Cas9 ortholog or a Cpf1, and a single guide RNA (sgRNA), wherein:
(a) the sgRNA is located upstream (5′) of the cas9 enzyme; and/or
(b) the sgRNA is located downstream (3′) of the cas9 enzyme; and/or
(v) the RNAi agent (e.g., a dsRNA, siRNA, shRNA, pre-miRNA, pri-miRNA, miRNA, stRNA, lncRNA, piRNA, or snoRNA), modulates, e.g., inhibits, expression of, a CNS related gene, mRNA, and/or protein, optionally wherein the CNS related gene is chosen from SOD1, MAPT, APOE, HTT, C9ORF72, TDP-43, APP, BACE, SNCA, ATXN1, ATXN3, ATXN7, SCN1A-SCN5A, SCN8A-SCN11A, or a combination thereof.

37. The AAV particle of any one of claims 34-36, which comprises a viral genome comprising a promoter operably linked to the nucleic acid sequence encoding the payload, optionally wherein:
(i) the promoter is chosen from human elongation factor 1α-subunit (EF1α), cytomegalovirus (CMV) immediate-early enhancer and/or promoter, chicken β-actin (CBA) and its derivative CAG, P glucuronidase (GUSB), or ubiquitin C (UBC), neuron-specific enolase (NSE), platelet-derived growth factor (PDGF), platelet-derived growth factor B-chain (PDGF-$), intercellular adhesion molecule 2 (ICAM-2), synapsin (Syn), methyl-CpG binding protein 2 (MeCP2), Ca2+/calmodulin-dependent protein kinase II (CaMKII), metabotropic glutamate receptor 2 (mGluR2), neurofilament light (NFL) or heavy (NFH), β-globin minigene nβ2, preproenkephalin (PPE), enkephalin (Enk) and excitatory amino acid transporter 2 (EAAT2), glial fibrillary acidic protein (GFAP), myelin basic protein (MBP), a cardiovascular promoter (e.g., αMHC, cTnT, and CMV-MLC2k), a liver promoter (e.g., hAAT, TBG), a skeletal muscle promoter (e.g., desmin, MCK, C512) or a fragment, e.g., a truncation, or a functional variant thereof;
(ii) the promoter is an EF-1α promoter variant, e.g., a truncated EF-1α promoter; or
(iii) the promoter comprises the nucleotide sequence of any one of SEQ ID NOs: 19, 20, 22, 23, 27, 28, 30-39 or any one of the sequences provided in Table 12, a nucleotide sequence comprising at least one, two, or three but no more than four modifications, e.g., substitutions (e.g., conservative substitutions), relative to the nucleotide sequence of SEQ ID NOs: 19, 20, 22, 23, 27, 28, 30-39 or any one of the sequences provided in Table 12 or any one of the sequences provided in Table 8, or a nucleotide sequence with at least 80% (e.g., 85%, 90%, 95%, 96%, 97%, 98%, or 99%) sequence identity to any one of SEQ ID NOs: 19, 20, 22, 23, 27, 28, 30-39 or any one of the sequences provided in Table 12.

38. The AAV particle of claim 35, wherein the viral genome further comprises:
(i) a polyA signal sequence;
(ii) an inverted terminal repeat (ITR) sequence, optionally wherein the ITR sequence is positioned 5′ relative to the encoded payload and/or the ITR sequence is positioned 3′ relative to the encoded payload;
(iii) an enhancer, a Kozak sequence, an intron region, and/or an exon region;
(iv) a nucleotide sequence encoding a miR binding site, e.g., a miR binding site that modulates, e.g., reduces, expression of the antibody molecule encoded by the viral genome in a cell or tissue where the corresponding miRNA is expressed, optionally wherein the encoded miR binding site modulates, e.g., reduces, expression of the encoded antibody molecule in a cell or tissue of the DRG, liver, heart, hematopoietic lineage, or a combination thereof; and/or
(v) a nucleotide sequence encoding a Rep protein, e.g., a non-structural protein, wherein the Rep protein comprises a Rep78 protein, a Rep68, Rep52 protein, and/or a Rep40 protein, optionally wherein the Rep78 protein, the Rep68 protein, the Rep52 protein, and/or the Rep40 protein are encoded by at least one Rep gene.
the viral genome further comprises a polyA signal sequence.

39. The AAV particle of claim 38, wherein the viral genome comprises:
(i) at least 1-5 copies of the encoded miR binding site, e.g., at least 1, 2, 3, 4, or 5 copies;
(ii) at least 3 copies of an encoded miR binding sites, optionally wherein:
(a) all three copies comprise the same miR binding site, or at least one, two, three, or all of the copies comprise a different miR binding site; and/or
(b) the 3 copies of the encoded miR binding sites are continuous (e.g., not separated by a spacer), or are separated by a spacer, optionally wherein the spacer comprises the nucleotide sequence of GATAGTTA, or a nucleotide sequence having at least one, two, or three modifications, e.g., substitutions (e.g., conservative substitutions), but no more than four modifications, e.g., substitutions (e.g., conservative substitutions), relative to the nucleotide sequence of GATAGTTA; or
(iii) at least 4 copies of an encoded miR binding site, optionally wherein
(a) all four copies comprise the same miR binding site, or at least one, two, three, or all of the copies comprise a different miR binding site; and/or
(b) the 4 copies of the encoded miR binding sites are continuous (e.g., not separated by a spacer), or are separated by a spacer, optionally wherein the spacer comprises the nucleotide sequence of GATAGTTA, or a nucleotide sequence having at least one, two, or three modifications, e.g., substitutions (e.g., conservative substitutions), but no more than four modifications, e.g., substitutions (e.g., conservative substitutions), relative to the nucleotide sequence of GATAGTTA.

40. The AAV particle of claim 38 or 39, wherein the encoded miR binding site comprises a miR122 binding site, a miR183 binding site, a miR-1 binding site, a miR-142-3p, or a combination thereof, optionally wherein:
(i) the encoded miR122 binding site comprises the nucleotide sequence of SEQ ID NO: 3672, or a nucleotide sequence substantially identical (e.g., having at least 70%, 75%, 80%, 85%, 90%, 92%, 95%, 97%, 98%, or 99% sequence identity) thereto; or a nucleotide sequence having at least one, two, three, four, five, six, or seven modifications, e.g., substitutions (e.g., conservative substitutions), but no more than ten modifications, e.g., substitutions (e.g., conservative substitutions), relative to SEQ ID NO: 3672;
(ii) the encoded miR183 binding site comprises the nucleotide sequence of SEQ ID NO: 3675, or a nucleotide sequence substantially identical (e.g., having at least 70%, 75%, 80%, 85%, 90%, 92%, 95%, 97%, 98%, or 99% sequence identity) thereto; or a nucleotide sequence having at least one, two, three, four, five, six, or seven modifications, e.g., substitutions (e.g., conservative substitutions), but no more than ten modifications, e.g., substitutions (e.g., conservative substitutions), relative to SEQ ID NO: 3675;
(iii) the encoded miR-1 binding site comprises the nucleotide sequence of SEQ ID NO: 4679, or a nucleotide sequence substantially identical (e.g., having at least 70%, 75%, 80%, 85%, 90%, 92%, 95%, 97%, 98%, or 99% sequence identity) thereto; or a nucleotide sequence having at least one, two, three, four, five, six, or seven modifications, e.g., substitutions (e.g., conservative substitutions), but no more than ten modifications, e.g., substitutions (e.g., conservative substitutions), relative to SEQ ID NO: 4679; and/or
(iv) the encoded miR-142-3p binding site comprises the nucleotide sequence of SEQ ID NO: 3674, or a nucleotide sequence substantially identical (e.g., having at least 70%, 75%, 80%, 85%, 90%, 92%, 95%, 97%, 98%, or 99% sequence identity) thereto; or a nucleotide sequence having at least one, two, three, four, five, six, or seven modifications, e.g., substitutions (e.g., conservative substitutions), but no more than ten modifications, e.g., substitutions (e.g., conservative substitutions), relative to SEQ ID NO: 3674.

41. The AAV particle of any one of claims 37-40, wherein the viral genome:
(i) is single stranded;
(ii) is self-complementary; and/or
(ii) further comprises a nucleic acid encoding the AAV capsid variant of any one of claims 1-30.

42. The AAV capsid variant, polynucleotide, peptide, or AAV particle of any one of the preceding claims which is isolated, e.g., recombinant.

43. A vector comprising a polynucleotide encoding the AAV capsid variant of any one of claims 1-30 or 4, or the polynucleotide of any one of claims 31, 32, or 42.

44. A cell, e.g., a host cell, comprising the AAV capsid variant of any one of claims 1-30 or 42, the polynucleotide of any one of claim 31, 32, or 42, the peptide of claim 33 or 42, the AAV particle of any one of claims 34-42, or the vector of claim 43, optionally wherein:
(i) the cell is a mammalian cell or an insect cell;
(ii) the cell is a cell of a brain region or a spinal cord region, optionally a cell of the brain stem, hippocampus, or thalamus; and/or
(iii) the cell is a neuron, a sensory neuron, a motor neuron, an astrocyte, a glial cell, oligodendrocyte, or a muscle cell (e.g., a cell of the heart, diaphragm, or quadriceps).

45. A method of making an AAV particle, comprising
(i) providing a host cell comprising a viral genome; and
(ii) incubating the host cell under conditions suitable to enclose the viral genome in the AAV capsid variant of any one of claims 1-30 or 42, or an AAV capsid variant encoded by the polynucleotide of any one of claims 31, 32, or 42;
thereby making the AAV particle.

46. A pharmaceutical composition comprising the AAV particle of any one of claims 34-42, an AAV particle comprising the AAV capsid variant of any one of claims 1-30 or 42, and a pharmaceutically acceptable excipient.

47. A pharmaceutical formulation comprising the AAV particle of any one of claims 34-42, an AAV particle comprising the AAV capsid variant of any one of claims 1-30 or 42; and further comprising:
(i) a buffering agent (e.g., a tris base); and a polyether, e.g., one or more polyethers (e.g., glycerol, glycerin, and polyethylene glycol (e.g., low-molecular-weight PEG));
(ii) a buffering agent (e.g., a tris base); a polyether (e.g., glycerol, glycerin, and polyethylene glycol (e.g., low-molecular-weight PEG)); a salt (e.g., sodium chloride, potassium chloride, or magnesium chloride); and a surfactant (e.g., an ethylene oxide/propylene oxide copolymer (e.g., poloxamers such as Pluronic® F-68 or F-127)), or a zwitterionic surfactant, wherein the concentration of the surfactant, e.g., Pluronic F-68, is between 0.0005-0.0015% (e.g., 0.0008-0.0012%, e.g., 0.001% or about 0.001%));
(iii) a buffering agent (e.g., a tris base); a sugar (e.g., trehalose, sucrose, lactulose, lactose, maltose, cellobiose, chitobiose, kojibiose, nigerose, isomaltose, β,β-trehalose, α,β-trehalose, sophorose, laminaribiose, gentiobiose, turanose, maltulose, palatinose, gentiobiulose, mannobiose, melibiose, melibiulose, rutinose, rutinulose, or xylobiose); a salt (e.g., sodium chloride, potassium chloride, or magnesium chloride); and a surfactant (e.g., an ethylene oxide/propylene oxide copolymer (e.g., poloxamers such as Pluronic® F-68 or F-127)), or a zwitterionic surfactant, wherein the concentration of the surfactant, e.g., Pluronic F-68, is between 0.0005-0.0015% (e.g., 0.0008-0.0012%, e.g., 0.001% or about 0.001%)); or
(iv) a buffering agent (e.g., a tris base); and a sugar (e.g., trehalose, sucrose, lactulose, lactose, maltose, cellobiose, chitobiose, kojibiose, nigerose, isomaltose, β,β-trehalose, α,β-trehalose, sophorose, laminaribiose, gentiobiose, turanose, maltulose, palatinose, gentiobiulose, mannobiose, melibiose, melibiulose, rutinose, rutinulose, or xylobiose);
optionally wherein the AAV particle is present at a dose of:
(a) 6.7e11 VG/kg to 2e13 VG/kg (e.g., 6.7e11 VG/kg, 2e12 VG/kg, 6.7e12 VG/kg, or 2e13 VG/kg) or about 5e11 VG/kg to 3e13 VG/kg;
(b) about 6.7e10 VG/kg to 6.7e12 VG/kg, about 1.3e11 VG/kg to 3.4e12 VG/kg, or about 2.2e11 VG/kg to 2e12 VG/kg;
(c) about 4e11 VG/kg to 8e11 VG/kg (e.g., about 6.7e11 VG/kg);
(d) about 2e11 VG/kg to 2e13 VG/kg, about 4e11 VG/kg to 1e13 VG/kg, about 6.7e11 VG/kg to about 6e12 VG/kg;
(e) about 1e12 VG/kg to 5e12 VG/kg (e.g., about 2e12 VG/kg);
(f) about 6.7e11 VG/kg to 6.7e13 VG/kg, about 1.3e12 VG/kg to 3.4e13 VG/kg, or about 2.2e12 VG/kg to 2e13 VG/kg;
(g) about 4e12 VG/kg to 8e12 VG/kg (e.g., about 6.7e12 VG/kg);
(h) about 2e12 VG/kg to 2e14 VG/kg, about 4e12 VG/kg to 1e14 VG/kg, about 6.7e12 VG/kg to about 6e13 VG/kg; or
(i) about 1e13 VG/kg to 5e13 VG/kg (e.g., about 2e13 VG/kg).

48. A method of delivering a payload to a cell or tissue (e.g., a CNS cell or a CNS tissue), comprising administering an effective amount of the pharmaceutical composition of claim 46, the pharmaceutical formulation of claim 47, or the AAV particle of any one of claims 34-42, or an AAV particle comprising the capsid variant of any one of claims 1-30 or 42.

49. The method of claim 48, wherein the cell is:
(i) a cell of a brain region or a spinal cord region, optionally a cell of the frontal cortex, sensory cortex, motor cortex, caudate, cerebellar cortex, cerebral cortex, brain stem, hippocampus, or thalamus;
(ii) a neuron, a sensory neuron, a motor neuron, an astrocyte, a glial cell, or an oligodendrocyte; and/or
(iii) within a subject, optionally wherein the subject has, has been diagnosed with having, or is at risk of having a neurological disorder, e.g., a neurodegenerative disorder, a neuro-oncological disorder, a muscular disorder, or a neuromuscular disorder.

50. A method of treating a subject having or diagnosed with having a neurological disorder, e.g., a neurodegenerative disorder, a neuro-oncological disorder, a muscular disorder, or a neuromuscular disorder, comprising administering to the subject an effective amount of the pharmaceutical composition of claim 46, the pharmaceutical formulation of claim 47, the AAV particle of any one of claims 34-42, or an AAV particle comprising the capsid variant of any one of claims 1-30 or 42.

51. The method of claim 49 or 50, wherein the neurological disorder, neurodegenerative disorder, muscular disorder, neuromuscular disorder, or neuro-oncological disorder is Huntington's Disease, Amyotrophic Lateral Sclerosis (ALS), Gaucher Disease, Dementia with Lewy Bodies, Parkinson's disease, Spinal Muscular Atrophy, Alzheimer's Disease, a leukodystrophy (e.g., Alexander disease, autosomal dominant leukodystrophy with autonomic diseases (ADLD), Canavan disease, cerebrotendinous xanthomatosis (CTX), metachromatic leukodystrophy (MLD), Pelizaeus-Merzbacher disease, or Refsum disease), or a cancer (e.g., a HER2/neu positive cancer or a glioblastoma).

52. The method of claim 50 or 51, where treating comprises prevention of progression of the disease or disorder in the subject, optionally wherein the subject is a human.

53. The method of any one of claims 49-52, wherein the AAV particle is administered to the subject:
(i) intravenously, via intra-cisterna magna injection (ICM), intracerebrally, intrathecally, intracerebroventricularly, via intraparenchymal administration, or intramuscularly;
(ii) via focused ultrasound (FUS), e.g., coupled with the intravenous administration of microbubbles (FUS-MB), or MRI-guided FUS coupled with intravenous administration; or
(iii) intravenously.

54. The method of any one of claims 49-53, wherein the wherein the AAV particle is administered to the subject at a dose of:
(a) about 6.7e11 VG/kg to 2e13 VG/kg (e.g., 6.7e11 VG/kg, 2e12 VG/kg, 6.7e12 VG/kg, or 2e13 VG/kg) or about 5e11 VG/kg to 3e13 VG/kg;
(b) about 6.7e10 VG/kg to 6.7e12 VG/kg, about 1.3e11 VG/kg to 3.4e12 VG/kg, or about 2.2e11 VG/kg to 2e12 VG/kg;
(c) about 4e11 VG/kg to 8e11 VG/kg (e.g., about 6.7e11 VG/kg);
(d) about 2e11 VG/kg to 2e13 VG/kg, about 4e11 VG/kg to 1e13 VG/kg, about 6.7e11 VG/kg to about 6e12 VG/kg;
(e) about 1e12 VG/kg to 5e12 VG/kg (e.g., about 2e12 VG/kg);
(f) about 6.7e11 VG/kg to 6.7e13 VG/kg, about 1.3e12 VG/kg to 3.4e13 VG/kg, or about 2.2e12 VG/kg to 2e13 VG/kg;
(g) about 4e12 VG/kg to 8e12 VG/kg (e.g., about 6.7e12 VG/kg);
(h) about 2e12 VG/kg to 2e14 VG/kg, about 4e12 VG/kg to 1e14 VG/kg, about 6.7e12 VG/kg to about 6e13 VG/kg; or
(i) about 1e13 VG/kg to 5e13 VG/kg (e.g., about 2e13 VG/kg).

55. The pharmaceutical composition of claim 46, the pharmaceutical formulation of claim 47, the AAV particle of any one of claims 34-42, or an AAV particle comprising the capsid variant of any one of claims 1-30 or 42, for use in a method of delivering a payload to a cell or tissue.

56. The pharmaceutical composition of claim 46, the pharmaceutical formulation of claim 47, the AAV particle of any one of claims 34-42, or an AAV particle comprising the capsid variant of any one of claims 1-30 or 42, for use in a method of treating a neurological disorder, a neurodegenerative disorder, a muscular disorder, a neuromuscular disorder, or a neuro-oncological disorder.

57. The pharmaceutical composition of claim 46, the pharmaceutical formulation of claim 47, the AAV particle of any one of claims 34-42, or an AAV particle comprising the capsid variant of any one of claims 1-30 or 42, for use in the manufacture of a medicament.

58. Use of the pharmaceutical composition of claim 46, the pharmaceutical formulation of claim 47, the AAV particle of any one of claims 34-42, or an AAV particle comprising the capsid variant of any one of claims 1-30 or 42, in the manufacture of a medicament for treating a neurological disorder, a neurodegenerative disorder, a muscular disorder, a neuromuscular disorder, or a neuro-oncological disorder.

59. Use of the pharmaceutical composition of claim 46, the pharmaceutical formulation of claim 47, or the AAV particle of any one of claims 34-42, an AAV particle comprising the capsid variant of any one of claims 1-30 or 4, in the manufacture of a medicament.
